(19) United States
(12) Patent Application Publication
(10) Pub. No.: US 2002/0045170 A1
(43) Pub. Date: Apr. 18, 2002

(54) Polynucleotides encoding novel secreted proteins

(76) Inventors: Gordon G. Wong, Brookline, MA (US); Hilary F. Clark, San Francisco, CA (US); Kim Fechtel, Arlington, MA (US); Michael J. Agostino, Andover, MA (US); Steven H. Howes, Cambridge, MA (US); Richard J. Resnick, Somerville, MA (US); Kamalakar Gulukota, Lawrenceville, NJ (US); James R. Graham, Arlington, MA (US)

Correspondence Address: LAHIVE & COCKFIELD, 28 STATE STREET, BOSTON, MA, 02109, US

(21) Appl. No.: 09/822,849

(22) Filed: Mar. 29, 2001

Related U.S. Application Data
(60) Provisional application No. 60/195,582, filed on Apr. 6, 2000.

(51) Int. Cl. C12Q 1/68; G01N 33/53; C07H 21/04; C12N 5/06; C12P 21/02

(52) U.S. Cl. 435/6; 435/7.1; 435/69.1; 435/325; 435/320.1; 536/23.2

(57) ABSTRACT

Isolated polynucleotides which have been derived from a variety of human tissue sources, and which encode novel secreted proteins, are provided. Also provided are methods for producing proteins using these polynucleotides, and the proteins so produced.

### RELATED APPLICATIONS

[0001] This application claims the benefit of prior-filed provisional patent application U.S. Ser. No. 60/195,582 entitled “Polynucleotides Encoding Novel Secreted Proteins”, filed Apr. 6, 2000. The content of the above-referenced application is incorporated in its entirety.

### FIELD OF THE INVENTION

[0002] The present invention provides novel polynucleotides and proteins encoded by such polynucleotides, along with therapeutic, diagnostic and research utilities for these polynucleotides and proteins.

### BACKGROUND OF THE INVENTION

[0003] Gargantuan efforts have been employed by various investigational projects to randomly sequence portions of naturally-occurring cDNAs. The rationale behind this approach to identification and sequencing genes is founded in two basic principles: (1) that transcribed cDNAs represent the product of the most important genes, namely those that are actually expressed in vivo, and (2) that efforts to sequence genes and other portions of the genome of target organisms which are not actually expressed wastes substantial effort on areas not likely to yield genetic information of therapeutic importance. Thus, the high-throughput sequencing efforts focus on only those portions of the genome which are expressed. The randomly produced cDNA sequences represent “expressed sequence tags” or “ESTs”, which identify and can be used as probes for the longer, full-length cDNA or genomic sequence from which they were transcribed.

[0004] Although this “shortcut” approach to genomic sequencing presents savings of effort compared to sequencing of the complete genome, it still produced a vast array of ESTs which may not be directly useful as protein therapeutics. To date, the majority of protein-related drug discovery has focused on the use of secreted proteins to produce a desired therapeutic effect. Since the EST approach theoretically identifies all expressed proteins, it produces an EST library which contains a mixture of secreted proteins (such as hormones, cytokines and receptors) and non-secreted proteins (such as, for example, metabolic enzymes and cellular structural proteins), without identifying which ESTs correspond to proteins falling into either category. As a result, these methods are not optimally tailored to the needs of investigators searching for secreted proteins because they must separate the secreted “wheat” from the non-secreted “chaff”, wasting effort and resources in the process.

[0005] Technology aimed at the discovery of protein factors (including e.g., cytokines, such as lymphokines, interferons, CSFs and interleukins) has matured rapidly over the past decade. The now routine hybridization cloning and expression cloning techniques clone novel polynucleotides “directly” in the sense that they rely on information directly related to the discovered protein (i.e., partial DNA/amino acid sequence of the protein in the case of hybridization cloning; activity of the protein in the case of expression cloning).

[0006] More recent “indirect” cloning techniques such as signal sequence cloning, which isolates DNA sequences based on the presence of a now well-recognized secretory leader sequence motif, as well as various PCR-based or low stringency hybridization cloning techniques, have advanced the state of the art by making available large numbers of DNA/amino acid sequences for proteins that are known to have biological activity by virtue of their secreted nature in the case of leader sequence cloning, or by virtue of the cell or tissue source in the case of PCR-based techniques. Co-assigned U.S. Pat. No. 5,536,637, which is incorporated herein by reference, provides methods for focusing genomic sequencing efforts on sequences encoding the secreted proteins which are of most interest for identification of protein therapeutics. The '637 patent discloses a “signal sequence trap” which selectively identifies partial sequences encoding secreted proteins, namely “secreted expressed sequence tags” or “sESTs”. The sequences of these sESTs can be used to design probes to isolate the full-length cDNA clones that encode secreted proteins.

[0007] It is to these secreted proteins and the full-length polynucleotides encoding them that the present invention is directed.

### SUMMARY OF THE INVENTION

[0008] The present invention provides for full-length cDNAs isolated from a variety of human RNA/cDNA sources which encode novel secreted proteins.

[0009] In preferred embodiments, the present invention provides an isolated polynucleotide comprising a nucleotide sequence selected from the group consisting of:

[0010] SEQ ID NO:1, SEQ ID NO:2, SEQ ID NO:3, SEQ ID NO:4, SEQ ID NO:5, SEQ ID NO:6, SEQ ID NO:7, SEQ ID NO:8, SEQ ID NO:9, SEQ ID NO:10, SEQ ID NO:11, SEQ ID NO:12, SEQ ID NO:13, SEQ ID NO:14, SEQ ID NO:15, SEQ ID NO:16, SEQ ID NO:17, SEQ ID NO:18, SEQ ID NO:19, SEQ ID NO:20, SEQ ID NO:21, SEQ ID NO:22, SEQ ID NO:23, SEQ ID NO:24, SEQ ID NO:25, SEQ ID NO:26, SEQ ID NO:27, SEQ ID NO:28, SEQ ID NO:29, SEQ ID NO:30, SEQ ID NO:31, SEQ ID NO:32, SEQ ID NO:33, SEQ ID NO:34, SEQ ID NO:35, SEQ ID NO:36, SEQ ID NO:37, SEQ ID NO:38, SEQ ID NO:39, SEQ ID NO:40, SEQ ID NO:41, SEQ ID NO:42, SEQ ID NO:43, SEQ ID NO:44, SEQ ID NO:45, SEQ ID NO:46, SEQ ID NO:47, SEQ ID NO:48, SEQ ID NO:49, SEQ ID NO:50, SEQ ID NO:51, SEQ ID NO:52, SEQ ID NO:53, SEQ ID NO:54, SEQ ID NO:55, SEQ ID NO:56, SEQ ID NO:57, SEQ ID NO:58, SEQ ID NO:59, SEQ ID NO:60, SEQ ID NO:61, SEQ ID NO:62, SEQ ID NO:63, SEQ ID NO:64, SEQ ID NO:65, SEQ ID NO:66, SEQ ID NO:67, SEQ ID NO:68, SEQ ID NO:69, SEQ ID NO:70, SEQ ID NO:71, SEQ ID NO:72, SEQ ID NO:73, SEQ ID NO:74, SEQ ID NO:75, SEQ ID NO:76, SEQ ID NO:77, SEQ ID NO:78, SEQ ID NO:79, SEQ ID NO:80, SEQ ID NO:81, SEQ ID NO:82, SEQ ID NO:83, SEQ ID NO:84, SEQ ID NO:85, SEQ ID NO:86, SEQ ID NO:87, SEQ ID NO:88, SEQ ID NO:89, SEQ ID NO:90, SEQ ID NO:91, SEQ ID NO:92, SEQ ID NO:93, SEQ ID NO:94, SEQ ID NO:95, SEQ ID NO:96, SEQ ID NO:97, SEQ ID NO:98, SEQ ID NO:99, SEQ ID NO:100, SEQ ID NO:101, SEQ ID NO:102, SEQ ID NO:103, SEQ ID NO:104, SEQ ID NO:105, SEQ ID NO:106, SEQ ID NO:107, SEQ ID NO:108, SEQ ID NO:109, SEQ ID NO:110, SEQ ID NO:111, SEQ ID NO:112, SEQ ID NO:113, SEQ ID NO:114, SEQ ID NO:115, SEQ ID NO:116, SEQ ID NO:117, SEQ ID NO:118, SEQ ID NO:119, SEQ ID NO:120, SEQ ID NO:121, SEQ ID NO:122, SEQ ID NO:123, SEQ ID NO:124, SEQ ID NO:125, SEQ ID NO:126, SEQ ID NO:127, SEQ ID NO:128, SEQ ID NO:129, SEQ ID NO:130, SEQ ID NO:131, SEQ ID NO:132, SEQ ID NO:133, SEQ ID NO:134, SEQ ID NO:135, SEQ ID NO:136, SEQ ID NO:137, SEQ ID NO:138, SEQ ID NO:139, SEQ ID NO:140, SEQ ID NO:141, SEQ ID NO:142, SEQ ID NO:143, SEQ ID NO:144, SEQ ID NO:145, SEQ ID NO:146, SEQ ID NO:147, SEQ ID NO:148, SEQ ID NO:149, SEQ ID NO:150, SEQ ID NO:151, SEQ ID NO:152, SEQ ID NO:153, SEQ ID NO:154, SEQ ID NO:155, SEQ ID NO:156, SEQ ID NO:157, SEQ ID NO:158, SEQ ID NO:159, SEQ ID NO:160, SEQ ID NO:161, SEQ ID NO:162, SEQ ID NO:163, SEQ ID NO:164, SEQ ID NO:165, SEQ ID NO:166, SEQ ID NO:167, SEQ ID NO:168, SEQ ID NO:169, SEQ ID NO:170, SEQ ID NO:171, SEQ ID NO:172, SEQ ID NO:173, SEQ ID NO:174, SEQ ID NO:175, SEQ ID NO:176, SEQ ID NO:177, SEQ ID NO:178, SEQ ID NO:179, SEQ ID NO:180, SEQ ID NO:181, SEQ ID NO:182, SEQ ID NO:183, SEQ ID NO:184, SEQ ID NO:185, SEQ ID NO:186, SEQ ID NO:187, SEQ ID NO:188, SEQ ID NO:189, SEQ ID NO:190, SEQ ID NO:191, SEQ ID NO:192, SEQ ID NO:193, SEQ ID NO:194, SEQ ID NO:195, SEQ ID NO:196, SEQ ID NO:197, SEQ ID NO:198, SEQ ID NO:199, SEQ ID NO:200, SEQ ID NO:201, SEQ ID NO:202, SEQ ID NO:203, SEQ ID NO:204, SEQ ID NO:205, SEQ ID NO:206, SEQ ID NO:207, SEQ ID NO:208, SEQ ID NO:209, SEQ ID NO:210, SEQ ID NO:211, SEQ ID NO:212, SEQ ID NO:213, SEQ ID NO:214, SEQ ID NO:215, SEQ ID NO:216, SEQ ID NO:217, SEQ ID NO:218, SEQ ID NO:219, SEQ ID NO:220, SEQ ID NO:221, SEQ ID NO:222, SEQ ID NO:223, SEQ ID NO:224, SEQ ID NO:225, SEQ ID NO:226, SEQ ID NO:227, SEQ ID NO:228, SEQ ID NO:229, SEQ ID NO:230, SEQ ID NO:231, SEQ ID NO:232, SEQ ID NO:233, SEQ ID NO:234, SEQ ID NO:235, SEQ ID NO:236, SEQ ID NO:237, SEQ ID NO:238, SEQ ID NO:239, SEQ ID NO:240, SEQ ID NO:241, SEQ ID NO:242, SEQ ID NO:243, SEQ ID NO:244, SEQ ID NO:245, SEQ ID NO:246, SEQ ID NO:247, SEQ ID NO:248, SEQ ID NO:249, SEQ ID NO:250, SEQ ID NO:251, SEQ ID NO:252, SEQ ID NO:253, SEQ ID NO:254, SEQ ID NO:255, SEQ ID NO:256, SEQ ID NO:257, SEQ ID NO:258, SEQ ID NO:259, SEQ ID NO:260, SEQ ID NO:261, SEQ ID NO:262, SEQ ID NO:263, SEQ ID NO:264, SEQ ID NO:265, SEQ ID NO:266, SEQ ID NO:267, SEQ ID NO:268, SEQ ID NO:269, SEQ ID NO:270, SEQ ID NO:271, SEQ ID NO:272, SEQ ID NO:273, SEQ ID NO:274, SEQ ID NO:275, SEQ ID NO:276, SEQ ID NO:277, SEQ ID NO:278, SEQ ID NO:279, SEQ ID NO:280, SEQ ID NO:281, SEQ ID NO:282, SEQ ID NO:283, SEQ ID NO:284, SEQ ID NO:285, SEQ ID NO:286, SEQ ID NO:287, SEQ ID NO:288, SEQ ID NO:289, SEQ ID NO:290, SEQ ID NO:291, SEQ ID NO:292, SEQ ID NO:293, SEQ ID NO:294, SEQ ID NO:295, SEQ ID NO:296, SEQ ID NO:297, SEQ ID NO:298, SEQ ID NO:299, SEQ ID NO:300, SEQ ID NO:301, SEQ ID NO:302, SEQ ID NO:303, SEQ ID NO:304, SEQ ID NO:305, SEQ ID NO:306, SEQ ID NO:307, SEQ ID NO:308, SEQ ID NO:309, SEQ ID NO:310, SEQ ID NO:311, SEQ ID NO:312, SEQ ID NO:313, SEQ ID NO:314, SEQ ID NO:315, SEQ ID NO:316, SEQ ID NO:317, SEQ ID NO:318, SEQ ID NO:319, SEQ ID NO:320, SEQ ID NO:321, SEQ ID NO:322, SEQ ID NO:323, SEQ ID NO:324, SEQ ID NO:325, SEQ ID NO:326, SEQ ID NO:327, SEQ ID NO:328, SEQ ID NO:329, SEQ ID NO:330, SEQ ID NO:331, SEQ ID NO:332, SEQ ID NO:333, SEQ ID NO:334, SEQ ID NO:335, SEQ ID NO:336, SEQ ID NO:337, SEQ ID NO:338, SEQ ID NO:339, SEQ ID NO:340, SEQ ID NO:341, SEQ ID NO:342, SEQ ID NO:343, SEQ ID NO:344, SEQ ID NO:345, SEQ ID NO:346, SEQ ID NO:347, SEQ ID NO:348, SEQ ID NO:349, SEQ ID NO:350, SEQ ID NO:351, SEQ ID NO:352, SEQ ID NO:353, SEQ ID NO:354, SEQ ID NO:355, SEQ ID NO:356, SEQ ID NO:357, SEQ ID NO:358, SEQ ID NO:359, SEQ ID NO:360, SEQ ID NO:361, SEQ ID NO:362, SEQ ID NO:363, SEQ ID NO:364, SEQ ID NO:365, SEQ ID NO:366, SEQ ID NO:367, SEQ ID NO:368, SEQ ID NO:369, SEQ ID NO:370, SEQ ID NO:371, SEQ ID NO:372, SEQ ID NO:373, SEQ ID NO:374, SEQ ID NO:375, SEQ ID NO:376, SEQ ID NO:377, SEQ ID NO:378, SEQ ID NO:379, SEQ ID NO:380, SEQ ID NO:381, SEQ ID NO:382, SEQ ID NO:383, SEQ ID NO:384, SEQ ID NO:385, SEQ ID NO:386, SEQ ID NO:387, SEQ ID NO:388, SEQ ID NO:389, SEQ ID NO:390, SEQ ID NO:391, SEQ ID NO:392, SEQ ID NO:393, SEQ ID NO:394, SEQ ID NO:395, SEQ ID NO:396, SEQ ID NO:397, SEQ ID NO:398, SEQ ID NO:399, SEQ ID NO:400, SEQ ID NO:401, SEQ ID NO:402, SEQ ID NO:403, SEQ ID NO:404, SEQ ID NO:405, SEQ ID NO:406, SEQ ID NO:407, SEQ ID NO:408, SEQ ID NO:409, SEQ ID NO:410, SEQ ID NO:411, SEQ ID NO:412, SEQ ID NO:413, SEQ ID NO:414, SEQ ID NO:415, SEQ ID NO:416, SEQ ID NO:417, SEQ ID NO:418, SEQ ID NO:419, SEQ ID NO:420, SEQ ID NO:421, SEQ ID NO:422, SEQ ID NO:423, SEQ ID NO:424, SEQ ID NO:425, SEQ ID NO:426, SEQ ID NO:427, SEQ ID NO:428, SEQ ID NO:429, SEQ ID NO:430, SEQ ID NO:431, SEQ ID NO:432, SEQ ID NO:433, SEQ ID NO:434, SEQ ID NO:435, SEQ ID NO:436, SEQ ID NO:437, SEQ ID NO:438, SEQ ID NO:439, SEQ ID NO:440, SEQ ID NO:441, SEQ ID NO:442, SEQ ID NO:443, SEQ ID NO:444, SEQ ID NO:445, SEQ ID NO:446, SEQ ID NO:447, SEQ ID NO:448, SEQ ID NO:449, SEQ ID NO:450, SEQ ID NO:451, SEQ ID NO:452, SEQ ID NO:453, SEQ ID NO:454, SEQ ID NO:455, SEQ ID NO:456, SEQ ID NO:457, SEQ ID NO:458, SEQ ID NO:459, SEQ ID NO:460, SEQ ID NO:461, SEQ ID NO:462, SEQ ID NO:463, SEQ ID NO:464, SEQ ID NO:465, SEQ ID NO:466, SEQ ID NO:467, SEQ ID NO:468, SEQ ID NO:469, SEQ ID NO:470, SEQ ID NO:471, SEQ ID NO:472, SEQ ID NO:473, SEQ ID NO:474, SEQ ID NO:475, SEQ ID NO:476, SEQ ID NO:477, SEQ ID NO:478, SEQ ID NO:479, SEQ ID NO:480, SEQ ID NO:481, SEQ ID NO:482, SEQ ID NO:483, SEQ ID NO:484, SEQ ID NO:485, SEQ ID NO:486, SEQ ID NO:487, SEQ ID NO:488, SEQ ID NO:489, SEQ ID NO:490, SEQ ID NO:491, SEQ ID NO:492, SEQ ID NO:493, SEQ ID NO:494, SEQ ID NO:495, SEQ ID NO:496, SEQ ID NO:497, SEQ ID NO:498, SEQ ID NO:499, SEQ ID NO:500, SEQ ID NO:501, SEQ ID NO:502, SEQ ID NO:503, SEQ ID NO:504, SEQ ID NO:505, SEQ ID NO:506, SEQ ID NO:507, SEQ ID NO:508, SEQ ID NO:509, SEQ ID NO:510, SEQ ID NO:511, SEQ ID NO:512, SEQ ID NO:513, SEQ ID NO:514, SEQ ID NO:515, SEQ ID NO:516, SEQ ID NO:517, SEQ ID NO:518, SEQ ID NO:519, SEQ ID NO:520, SEQ ID NO:521, SEQ ID NO:522, SEQ ID NO:523, SEQ ID NO:524, SEQ ID NO:525, SEQ ID NO:526, SEQ ID NO:527, SEQ ID NO:528, SEQ ID NO:529, SEQ ID NO:530, SEQ ID NO:531, SEQ ID NO:532, SEQ ID NO:533, SEQ ID NO:534, SEQ ID NO:535, SEQ ID NO:536, SEQ ID NO:537, SEQ ID NO:538, SEQ ID NO:539, SEQ ID NO:540, SEQ ID NO:541, SEQ ID NO:542, SEQ ID NO:543, SEQ ID NO:544, SEQ ID NO:545, SEQ ID NO:546, SEQ ID NO:547, SEQ ID NO:548, SEQ ID NO:549, SEQ ID NO:550, SEQ ID NO:551, SEQ ID NO:552, SEQ ID NO:553, SEQ ID NO:554, SEQ ID NO:555, SEQ ID NO:556, SEQ ID NO:557, SEQ ID NO:558, SEQ ID NO:559, SEQ ID NO:560, SEQ ID NO:561, SEQ ID NO:562, SEQ ID NO:563, SEQ ID NO:564, SEQ ID NO:565, SEQ ID NO:566, SEQ ID NO:567, SEQ ID NO:568, SEQ ID NO:569, SEQ ID NO:570, SEQ ID NO:571, SEQ ID NO:572, SEQ ID NO:573, SEQ ID NO:574, SEQ ID NO:575, SEQ ID NO:576, SEQ ID NO:577, SEQ ID NO:578, SEQ ID NO:579, SEQ ID NO:580, SEQ ID NO:581, SEQ ID NO:582, SEQ ID NO:583, SEQ ID NO:584, SEQ ID NO:585, SEQ ID NO:586, SEQ ID NO:587, SEQ ID NO:588, SEQ ID NO:589, SEQ ID NO:590, SEQ ID NO:591, SEQ ID NO:592;

[0011] or a complement of said sequence.

[0012] In other embodiments, the present invention provides an isolated polynucleotide consisting of a nucleotide sequence selected from the group consisting of:

[0013] SEQ ID NO:1, SEQ ID NO:2, SEQ ID NO:3, SEQ ID NO:4, SEQ ID NO:5, SEQ ID NO:6, SEQ ID NO:7, SEQ ID NO:8, SEQ ID NO:9, SEQ ID NO:10, SEQ ID

[0014] NO:11, SEQ ID NO:12, SEQ ID NO:13, SEQ ID NO:14, SEQ ID NO:15, SEQ ID NO:16, SEQ ID NO:17, SEQ ID NO:18, SEQ ID NO:19, SEQ ID NO:20, SEQ ID NO:21, SEQ ID NO:22, SEQ ID NO:23, SEQ ID NO:24, SEQ ID NO:25, SEQ ID NO:26, SEQ ID NO:27, SEQ ID NO:28, SEQ ID NO:29, SEQ ID NO:30, SEQ ID NO:31, SEQ ID NO:32, SEQ ID NO:33, SEQ ID NO:34, SEQ ID NO:35, SEQ ID NO:36, SEQ ID NO:37, SEQ ID NO:38, SEQ ID NO:39, SEQ ID NO:40, SEQ ID NO:41, SEQ ID NO:42, SEQ ID NO:43, SEQ ID NO:44, SEQ ID NO:45, SEQ ID NO:46, SEQ ID NO:47, SEQ ID NO:48, SEQ ID NO:49, SEQ ID NO:50, SEQ ID NO:51, SEQ ID NO:52, SEQ ID NO:53, SEQ ID NO:54, SEQ ID NO:55, SEQ ID NO:56, SEQ ID NO:57, SEQ ID NO:58, SEQ ID NO:59, SEQ ID NO:60, SEQ ID NO:61, SEQ ID NO:62, SEQ ID NO:63, SEQ ID NO:64, SEQ ID NO:65, SEQ ID NO:66, SEQ ID NO:67, SEQ ID NO:68, SEQ ID NO:69, SEQ ID NO:70, SEQ ID NO:71, SEQ ID NO:72, SEQ ID NO:73, SEQ ID NO:74, SEQ ID NO:75, SEQ ID NO:76, SEQ ID NO:77, SEQ ID NO:78, SEQ ID NO:79, SEQ ID NO:80, SEQ ID NO:81, SEQ ID NO:82, SEQ ID NO:83, SEQ ID NO:84, SEQ ID NO:85, SEQ ID NO:86, SEQ ID NO:87, SEQ ID NO:88, SEQ ID NO:89, SEQ ID NO:90, SEQ ID NO:91, SEQ ID NO:92, SEQ ID NO:93, SEQ ID NO:94, SEQ ID NO:95, SEQ ID NO:96, SEQ ID NO:97, SEQ ID NO:98, SEQ ID NO:99, SEQ ID NO:100, SEQ ID NO:101, SEQ ID NO:102, SEQ ID NO:103, SEQ ID NO:104, SEQ ID NO:105, SEQ ID NO:106, SEQ ID NO:107, SEQ ID NO:108, SEQ ID NO:109, SEQ ID NO:110, SEQ ID NO:111, SEQ ID NO:112, SEQ ID NO:113, SEQ ID NO:114, SEQ ID NO:115, SEQ ID NO:116, SEQ ID NO:117, SEQ ID NO:118, SEQ ID NO:119, SEQ ID NO:120, SEQ ID NO:121, SEQ ID NO:122, SEQ ID NO:123, SEQ ID NO:124, SEQ ID NO:125, SEQ ID NO:126, SEQ ID NO:127, SEQ ID NO:128, SEQ ID NO:129, SEQ ID NO:130, SEQ ID NO:131, SEQ ID NO:132, SEQ ID NO:133, SEQ ID NO:134, SEQ ID NO:135, SEQ ID NO:136, SEQ ID NO:137, SEQ ID NO:138, SEQ ID NO:139, SEQ ID NO:140, SEQ ID NO:141, SEQ ID NO:142, SEQ ID NO:143, SEQ ID NO:144, SEQ ID NO:145, SEQ ID NO:146, SEQ ID NO:147, SEQ ID NO:148, SEQ ID NO:149, SEQ ID NO:150, SEQ ID NO:151, SEQ ID NO:152, SEQ ID NO:153, SEQ ID NO:154, SEQ ID NO:155, SEQ ID NO:156, SEQ ID NO:157, SEQ ID NO:158, SEQ ID NO:159, SEQ ID NO:160, SEQ ID NO:161, SEQ ID NO:162, SEQ ID NO:163, SEQ ID NO:164, SEQ ID NO:165, SEQ ID NO:166, SEQ ID NO:167, SEQ ID NO:168, SEQ ID NO:169, SEQ ID NO:170, SEQ ID NO:171, SEQ ID NO:172, SEQ ID NO:173, SEQ ID NO:174, SEQ ID NO:175, SEQ ID NO:176, SEQ ID NO:177, SEQ ID NO:178, SEQ ID NO:179, SEQ ID NO:180, SEQ ID NO:181, SEQ ID NO:182, SEQ ID NO:183, SEQ ID NO:184, SEQ ID NO:185, SEQ ID NO:186, SEQ ID NO:187, SEQ ID NO:188, SEQ ID NO:189, SEQ ID NO:190, SEQ ID NO:191, SEQ ID NO:192, SEQ ID NO:193, SEQ ID NO:194, SEQ ID NO:195, SEQ ID NO:196, SEQ ID NO:197, SEQ ID NO:198, SEQ ID NO:199, SEQ ID NO:200, SEQ ID NO:201, SEQ ID NO:202, SEQ ID NO:203, SEQ ID NO:204, SEQ ID NO:205, SEQ ID NO:206, SEQ ID NO:207, SEQ ID NO:208, SEQ ID NO:209, SEQ ID NO:210, SEQ ID NO:211, SEQ ID NO:212, SEQ ID NO:213, SEQ ID NO:214, SEQ ID NO:215, SEQ ID NO:216, SEQ ID NO:217, SEQ ID NO:218, SEQ ID NO:219, SEQ ID NO:220, SEQ ID NO:221, SEQ ID NO:222, SEQ ID NO:223, SEQ ID NO:224, SEQ ID NO:225, SEQ ID NO:226, SEQ ID NO:227, SEQ ID NO:228, SEQ ID NO:229, SEQ ID NO:230, SEQ ID NO:231, SEQ ID NO:232, SEQ ID NO:233, SEQ ID NO:234, SEQ ID NO:235, SEQ ID NO:236, SEQ ID NO:237, SEQ ID NO:238, SEQ ID NO:239, SEQ ID NO:240, SEQ ID NO:241, SEQ ID NO:242, SEQ ID NO:243, SEQ ID NO:244, SEQ ID NO:245, SEQ ID NO:246, SEQ ID NO:247, SEQ ID NO:248, SEQ ID NO:249, SEQ ID NO:250, SEQ ID NO:251, SEQ ID NO:252, SEQ ID NO:253, SEQ ID NO:254, SEQ ID NO:255, SEQ ID NO:256, SEQ ID NO:257, SEQ ID NO:258, SEQ ID NO:259, SEQ ID NO:260, SEQ ID NO:261, SEQ ID NO:262, SEQ ID NO:263, SEQ ID NO:264, SEQ ID NO:265, SEQ ID NO:266, SEQ ID NO:267, SEQ ID NO:268, SEQ ID NO:269, SEQ ID NO:270, SEQ ID NO:271, SEQ ID NO:272, SEQ ID NO:273, SEQ ID NO:274, SEQ ID NO:275, SEQ ID NO:276, SEQ ID NO:277, SEQ ID NO:278, SEQ ID NO:279, SEQ ID NO:280, SEQ ID NO:281, SEQ ID NO:282, SEQ ID NO:283, SEQ ID NO:284, SEQ ID NO:285, SEQ ID NO:286, SEQ ID NO:287, SEQ ID NO:288, SEQ ID NO:289, SEQ ID NO:290, SEQ ID NO:291, SEQ ID NO:292, SEQ ID NO:293, SEQ ID NO:294, SEQ ID NO:295, SEQ ID NO:296, SEQ ID NO:297, SEQ ID NO:298, SEQ ID NO:299, SEQ ID NO:300, SEQ ID NO:301, SEQ ID NO:302, SEQ ID NO:303, SEQ ID NO:304, SEQ ID NO:305, SEQ ID NO:306, SEQ ID NO:307, SEQ ID NO:308, SEQ ID NO:309, SEQ ID NO:310, SEQ ID NO:311, SEQ ID NO:312, SEQ ID NO:313, SEQ ID NO:314, SEQ ID NO:315, SEQ ID NO:316, SEQ ID NO:317, SEQ ID NO:318, SEQ ID NO:319, SEQ ID NO:320, SEQ ID NO:321, SEQ ID NO:322, SEQ ID NO:323, SEQ ID NO:324, SEQ ID NO:325, SEQ ID NO:326, SEQ ID NO:327, SEQ ID NO:328, SEQ ID NO:329, SEQ ID NO:330, SEQ ID NO:331, SEQ ID NO:332, SEQ ID NO:333, SEQ ID NO:334, SEQ ID NO:335, SEQ ID NO:336, SEQ ID NO:337, SEQ ID NO:338, SEQ ID NO:339, SEQ ID NO:340, SEQ ID NO:341, SEQ ID NO:342, SEQ ID NO:343, SEQ ID NO:344, SEQ ID NO:345, SEQ ID NO:346, SEQ ID NO:347, SEQ ID NO:348, SEQ ID NO:349, SEQ ID NO:350, SEQ ID NO:351, SEQ ID NO:352, SEQ ID NO:353, SEQ ID NO:354, SEQ ID NO:355, SEQ ID NO:356, SEQ ID NO:357, SEQ ID NO:358, SEQ ID NO:359, SEQ ID NO:360, SEQ ID NO:361, SEQ ID NO:362, SEQ ID NO:363, SEQ ID NO:364, SEQ ID NO:365, SEQ ID NO:366, SEQ ID NO:367, SEQ ID NO:368, SEQ ID NO:369, SEQ ID NO:370, SEQ ID NO:371, SEQ ID NO:372, SEQ ID NO:373, SEQ ID NO:374, SEQ ID NO:375, SEQ ID NO:376, SEQ ID NO:377, SEQ ID NO:378, SEQ ID NO:379, SEQ ID NO:380, SEQ ID NO:381, SEQ ID NO:382, SEQ ID NO:383, SEQ ID NO:384, SEQ ID NO:385, SEQ ID NO:386, SEQ ID NO:387, SEQ ID NO:388, SEQ ID NO:389, SEQ ID NO:390, SEQ ID NO:391, SEQ ID NO:392, SEQ ID NO:393, SEQ ID NO:394, SEQ ID NO:395, SEQ ID NO:396, SEQ ID NO:397, SEQ ID NO:398, SEQ ID NO:399, SEQ ID NO:400, SEQ ID NO:401, SEQ ID NO:402, SEQ ID NO:403, SEQ ID NO:404, SEQ ID NO:405, SEQ ID NO:406, SEQ ID NO:407, SEQ ID NO:408, SEQ ID NO:409, SEQ ID NO:410, SEQ ID NO:411, SEQ ID NO:412, SEQ ID NO:413, SEQ ID NO:414, SEQ ID NO:415, SEQ ID NO:416, SEQ ID NO:417, SEQ ID NO:418, SEQ ID NO:419, SEQ ID NO:420, SEQ ID NO:421, SEQ ID NO:422, SEQ ID NO:423, SEQ ID NO:424, SEQ ID NO:425, SEQ ID NO:426, SEQ ID NO:427, SEQ ID NO:428, SEQ ID NO:429, SEQ ID NO:430, SEQ ID NO:431, SEQ ID NO:432, SEQ ID NO:433, SEQ ID NO:434, SEQ ID NO:435, SEQ ID NO:436, SEQ ID NO:437, SEQ ID NO:438, SEQ ID NO:439, SEQ ID NO:440, SEQ ID NO:441, SEQ ID NO:442, SEQ ID NO:443, SEQ ID NO:444, SEQ ID NO:445, SEQ ID NO:446, SEQ ID NO:447, SEQ ID NO:448, SEQ ID NO:449, SEQ ID NO:450, SEQ ID NO:451, SEQ ID NO:452, SEQ ID NO:453, SEQ ID NO:454, SEQ ID NO:455, SEQ ID NO:456, SEQ ID NO:457, SEQ ID NO:458, SEQ ID NO:459, SEQ ID NO:460, SEQ ID NO:461, SEQ ID NO:462, SEQ ID NO:463, SEQ ID NO:464, SEQ ID NO:465, SEQ ID NO:466, SEQ ID NO:467, SEQ ID NO:468, SEQ ID NO:469, SEQ ID NO:470, SEQ ID NO:471, SEQ ID NO:472, SEQ ID NO:473, SEQ ID NO:474, SEQ ID NO:475, SEQ ID NO:476, SEQ ID NO:477, SEQ ID NO:478, SEQ ID NO:479, SEQ ID NO:480, SEQ ID NO:481, SEQ ID NO:482, SEQ ID NO:483, SEQ ID NO:484, SEQ ID NO:485, SEQ ID NO:486, SEQ ID NO:487, SEQ ID NO:488, SEQ ID NO:489, SEQ ID NO:490, SEQ ID NO:491, SEQ ID NO:492, SEQ ID NO:493, SEQ ID NO:494, SEQ ID NO:495, SEQ ID NO:496, SEQ ID NO:497, SEQ ID NO:498, SEQ ID NO:499, SEQ ID NO:500, SEQ ID NO:501, SEQ ID NO:502, SEQ ID NO:503, SEQ ID NO:504, SEQ ID NO:505, SEQ ID NO:506, SEQ ID NO:507, SEQ ID NO:508, SEQ ID NO:509, SEQ ID NO:510, SEQ ID NO:511, SEQ ID NO:512, SEQ ID NO:513, SEQ ID NO:514, SEQ ID NO:515, SEQ ID NO:516, SEQ ID NO:517, SEQ ID NO:518, SEQ ID NO:519, SEQ ID NO:520, SEQ ID NO:521, SEQ ID NO:522, SEQ ID NO:523, SEQ ID NO:524, SEQ ID NO:525, SEQ ID NO:526, SEQ ID NO:527, SEQ ID NO:528, SEQ ID NO:529, SEQ ID NO:530, SEQ ID NO:531, SEQ ID NO:532, SEQ ID NO:533, SEQ ID NO:534, SEQ ID NO:535, SEQ ID NO:536, SEQ ID NO:537, SEQ ID NO:538, SEQ ID NO:539, SEQ ID NO:540, SEQ ID NO:541, SEQ ID NO:542, SEQ ID NO:543, SEQ ID NO:544, SEQ ID NO:545, SEQ ID NO:546, SEQ ID NO:547, SEQ ID NO:548, SEQ ID NO:549, SEQ ID NO:550, SEQ ID NO:551, SEQ ID NO:552, SEQ ID NO:553, SEQ ID NO:554, SEQ ID NO:555, SEQ ID NO:556, SEQ ID NO:557, SEQ ID NO:558, SEQ ID NO:559, SEQ ID NO:560, SEQ ID NO:561, SEQ ID NO:562, SEQ ID NO:563, SEQ ID NO:564, SEQ ID NO:565, SEQ ID NO:566, SEQ ID NO:567, SEQ ID NO:568, SEQ ID NO:569, SEQ ID NO:570, SEQ ID NO:571, SEQ ID NO:572, SEQ ID NO:573, SEQ ID NO:574, SEQ ID NO:575, SEQ ID NO:576, SEQ ID NO:577, SEQ ID NO:578, SEQ ID NO:579, SEQ ID NO:580, SEQ ID NO:581, SEQ ID NO:582, SEQ ID NO:583, SEQ ID NO:584, SEQ ID NO:585, SEQ ID NO:586, SEQ ID NO:587, SEQ ID NO:588, SEQ ID NO:589, SEQ ID NO:590, SEQ ID NO:591, SEQ ID NO:592;

[0015] or a complement of said sequence.

[0016] In further embodiments, the present invention provides an isolated polynucleotide consisting essentially of a nucleotide sequence selected from the group consisting of:

[0017] SEQ ID NO:1, SEQ ID NO:2, SEQ ID NO:3, SEQ ID NO:4, SEQ ID NO:5, SEQ ID NO:6, SEQ ID NO:7, SEQ ID NO:8, SEQ ID NO:9, SEQ ID NO:10, SEQ ID

[0018] NO:11, SEQ ID NO:12, SEQ ID NO:13, SEQ ID NO:14, SEQ ID NO:15, SEQ ID NO:16, SEQ ID NO:17, SEQ ID NO:18, SEQ ID NO:19, SEQ ID NO:20, SEQ ID NO:21, SEQ ID NO:22, SEQ ID NO:23, SEQ ID NO:24, SEQ ID NO:25, SEQ ID NO:26, SEQ ID NO:27, SEQ ID NO:28, SEQ ID NO:29, SEQ ID NO:30, SEQ ID NO:31, SEQ ID NO:32, SEQ ID NO:33, SEQ ID NO:34, SEQ ID NO:35, SEQ ID NO:36, SEQ ID NO:37, SEQ ID NO:38, SEQ ID NO:39, SEQ ID NO:40, SEQ ID NO:41, SEQ ID NO:42, SEQ ID NO:43, SEQ ID NO:44, SEQ ID NO:45, SEQ ID NO:46, SEQ ID NO:47, SEQ ID NO:48, SEQ ID NO:49, SEQ ID NO:50, SEQ ID NO:51, SEQ ID NO:52, SEQ ID NO:53, SEQ ID NO:54, SEQ ID NO:55, SEQ ID NO:56, SEQ ID NO:57, SEQ ID NO:58, SEQ ID NO:59, SEQ ID NO:60, SEQ ID NO:61, SEQ ID NO:62, SEQ ID NO:63, SEQ ID NO:64, SEQ ID NO:65, SEQ ID NO:66, SEQ ID NO:67, SEQ ID NO:68, SEQ ID NO:69, SEQ ID NO:70, SEQ ID NO:71, SEQ ID NO:72, SEQ ID NO:73, SEQ ID NO:74, SEQ ID NO:75, SEQ ID NO:76, SEQ ID NO:77, SEQ ID NO:78, SEQ ID NO:79, SEQ ID NO:80, SEQ ID NO:81, SEQ ID NO:82, SEQ ID NO:83, SEQ ID NO:84, SEQ ID NO:85, SEQ ID NO:86, SEQ ID NO:87, SEQ ID NO:88, SEQ ID NO:89, SEQ ID NO:90, SEQ ID NO:91, SEQ ID NO:92, SEQ ID NO:93, SEQ ID NO:94, SEQ ID NO:95, SEQ ID NO:96, SEQ ID NO:97, SEQ ID NO:98, SEQ ID NO:99, SEQ ID NO:100, SEQ ID NO:101, SEQ ID NO:102, SEQ ID NO:103, SEQ ID NO:104, SEQ ID NO:105, SEQ ID NO:106, SEQ ID NO:107, SEQ ID NO:108, SEQ ID NO:109, SEQ ID NO:110, SEQ ID NO:111, SEQ ID NO:112, SEQ ID NO:113, SEQ ID NO:114, SEQ ID NO:115, SEQ ID NO:116, SEQ ID NO:117, SEQ ID NO:118, SEQ ID NO:119, SEQ ID NO:120, SEQ ID NO:121, SEQ ID NO:122, SEQ ID NO:123, SEQ ID NO:124, SEQ ID NO:125, SEQ ID NO:126, SEQ ID NO:127, SEQ ID NO:128, SEQ ID NO:129, SEQ ID NO:130, SEQ ID NO:131, SEQ ID NO:132, SEQ ID NO:133, SEQ ID NO:134, SEQ ID NO:135, SEQ ID NO:136, SEQ ID NO:137, SEQ ID NO:138, SEQ ID NO:139, SEQ ID NO:140, SEQ ID NO:141, SEQ ID NO:142, SEQ ID NO:143, SEQ ID NO:144, SEQ ID NO:145, SEQ ID NO:146, SEQ ID NO:147, SEQ ID NO:148, SEQ ID NO:149, SEQ ID NO:150, SEQ ID NO:151, SEQ ID NO:152, SEQ ID NO:153, SEQ ID NO:154, SEQ ID NO:155, SEQ ID NO:156, SEQ ID NO:157, SEQ ID NO:158, SEQ ID NO:159, SEQ ID NO:160, SEQ ID NO:161, SEQ ID NO:162, SEQ ID NO:163, SEQ ID NO:164, SEQ ID NO:165, SEQ ID NO:166, SEQ ID NO:167, SEQ ID NO:168, SEQ ID NO:169, SEQ ID NO:170, SEQ ID NO:171, SEQ ID NO:172, SEQ ID NO:173, SEQ ID NO:174, SEQ ID NO:175, SEQ ID NO:176, SEQ ID NO:177, SEQ ID NO:178, SEQ ID NO:179, SEQ ID NO:180, SEQ ID NO:181, SEQ ID NO:182, SEQ ID NO:183, SEQ ID NO:184, SEQ ID NO:185, SEQ ID NO:186, SEQ ID NO:187, SEQ ID NO:188, SEQ ID NO:189, SEQ ID NO:190, SEQ ID NO:191, SEQ ID NO:192, SEQ ID NO:193, SEQ ID NO:194, SEQ ID NO:195, SEQ ID NO:196, SEQ ID NO:197, SEQ ID NO:198, SEQ ID NO:199, SEQ ID NO:200, SEQ ID NO:201, SEQ ID NO:202, SEQ ID NO:203, SEQ ID NO:204, SEQ ID NO:205, SEQ ID NO:206, SEQ ID NO:207, SEQ ID NO:208, SEQ ID NO:209, SEQ ID NO:210, SEQ ID NO:211, SEQ ID NO:212, SEQ ID NO:213, SEQ ID NO:214, SEQ ID NO:215, SEQ ID NO:216, SEQ ID NO:217, SEQ ID NO:218, SEQ ID NO:219, SEQ ID NO:220, SEQ ID NO:221, SEQ ID NO:222, SEQ ID NO:223, SEQ ID NO:224, SEQ ID NO:225, SEQ ID NO:226, SEQ ID NO:227, SEQ ID NO:228, SEQ ID NO:229, SEQ ID NO:230, SEQ ID NO:231, SEQ ID NO:232, SEQ ID NO:233, SEQ ID NO:234, SEQ ID NO:235, SEQ ID NO:236, SEQ ID NO:237, SEQ ID NO:238, SEQ ID NO:239, SEQ ID NO:240, SEQ ID NO:241, SEQ ID NO:242, SEQ ID NO:243, SEQ ID NO:244, SEQ ID NO:245, SEQ ID NO:246, SEQ ID NO:247, SEQ ID NO:248, SEQ ID NO:249, SEQ ID NO:250, SEQ ID NO:251, SEQ ID NO:252, SEQ ID NO:253, SEQ ID NO:254, SEQ ID NO:255, SEQ ID NO:256, SEQ ID NO:257, SEQ ID NO:258, SEQ ID NO:259, SEQ ID NO:260, SEQ ID NO:261, SEQ ID NO:262, SEQ ID NO:263, SEQ ID NO:264, SEQ ID NO:265, SEQ ID NO:266, SEQ ID NO:267, SEQ ID NO:268, SEQ ID NO:269, SEQ ID NO:270, SEQ ID NO:271, SEQ ID NO:272, SEQ ID NO:273, SEQ ID NO:274, SEQ ID NO:275, SEQ ID NO:276, SEQ ID NO:277, SEQ ID NO:278, SEQ ID NO:279, SEQ ID NO:280, SEQ ID NO:281, SEQ ID NO:282, SEQ ID NO:283, SEQ ID NO:284, SEQ ID NO:285, SEQ ID NO:286, SEQ ID NO:287, SEQ ID NO:288, SEQ ID NO:289, SEQ ID NO:290, SEQ ID NO:291, SEQ ID NO:292, SEQ ID NO:293, SEQ ID NO:294, SEQ ID NO:295, SEQ ID NO:296, SEQ ID NO:297, SEQ ID NO:298, SEQ ID NO:299, SEQ ID NO:300, SEQ ID NO:301, SEQ ID NO:302, SEQ ID NO:303, SEQ ID NO:304, SEQ ID NO:305, SEQ ID NO:306, SEQ ID NO:307, SEQ ID NO:308, SEQ ID NO:309, SEQ ID NO:310, SEQ ID NO:311, SEQ ID NO:312, SEQ ID NO:313, SEQ ID NO:314, SEQ ID NO:315, SEQ ID NO:316, SEQ ID NO:317, SEQ ID NO:318, SEQ ID NO:319, SEQ ID NO:320, SEQ ID NO:321, SEQ ID NO:322, SEQ ID NO:323, SEQ ID NO:324, SEQ ID NO:325, SEQ ID NO:326, SEQ ID NO:327, SEQ ID NO:328, SEQ ID NO:329, SEQ ID NO:330, SEQ ID NO:331, SEQ ID NO:332, SEQ ID NO:333, SEQ ID NO:334, SEQ ID NO:335, SEQ ID NO:336, SEQ ID NO:337, SEQ ID NO:338, SEQ ID NO:339, SEQ ID NO:340, SEQ ID NO:341, SEQ ID NO:342, SEQ ID NO:343, SEQ ID NO:344, SEQ ID NO:345, SEQ ID NO:346, SEQ ID NO:347, SEQ ID NO:348, SEQ ID NO:349, SEQ ID NO:350, SEQ ID NO:351, SEQ ID NO:352, SEQ ID NO:353, SEQ ID NO:354, SEQ ID NO:355, SEQ ID NO:356, SEQ ID NO:357, SEQ ID NO:358, SEQ ID NO:359, SEQ ID NO:360, SEQ ID NO:361, SEQ ID NO:362, SEQ ID NO:363, SEQ ID NO:364, SEQ ID NO:365, SEQ ID NO:366, SEQ ID NO:367, SEQ ID NO:368, SEQ ID NO:369, SEQ ID NO:370, SEQ ID NO:371, SEQ ID NO:372, SEQ ID NO:373, SEQ ID NO:374, SEQ ID NO:375, SEQ ID NO:376, SEQ ID NO:377, SEQ ID NO:378, SEQ ID NO:379, SEQ ID NO:380, SEQ ID NO:381, SEQ ID NO:382, SEQ ID NO:383, SEQ ID NO:384, SEQ ID NO:385, SEQ ID NO:386, SEQ ID NO:387, SEQ ID NO:388, SEQ ID NO:389, SEQ ID NO:390, SEQ ID NO:391, SEQ ID NO:392, SEQ ID NO:393, SEQ ID NO:394, SEQ ID NO:395, SEQ ID NO:396, SEQ ID NO:397, SEQ ID NO:398, SEQ ID NO:399, SEQ ID NO:400, SEQ ID NO:401, SEQ ID NO:402, SEQ ID NO:403, SEQ ID NO:404, SEQ ID NO:405, SEQ ID NO:406, SEQ ID NO:407, SEQ ID NO:408, SEQ ID NO:409, SEQ ID NO:410, SEQ ID NO:411, SEQ ID NO:412, SEQ ID NO:413, SEQ ID NO:414, SEQ ID NO:415, SEQ ID NO:416, SEQ ID NO:417, SEQ ID NO:418, SEQ ID NO:419, SEQ ID NO:420, SEQ ID NO:421, SEQ ID NO:422, SEQ ID NO:423, SEQ ID NO:424, SEQ ID NO:425, SEQ ID NO:426, SEQ ID NO:427, SEQ ID NO:428, SEQ ID NO:429, SEQ ID NO:430, SEQ ID NO:431, SEQ ID NO:432, SEQ ID NO:433, SEQ ID NO:434, SEQ ID NO:435, SEQ ID NO:436, SEQ ID NO:437, SEQ ID NO:438, SEQ ID NO:439, SEQ ID NO:440, SEQ ID NO:441, SEQ ID NO:442, SEQ ID NO:443, SEQ ID NO:444, SEQ ID NO:445, SEQ ID NO:446, SEQ ID NO:447, SEQ ID NO:448, SEQ ID NO:449, SEQ ID NO:450, SEQ ID NO:451, SEQ ID NO:452, SEQ ID NO:453, SEQ ID NO:454, SEQ ID NO:455, SEQ ID NO:456, SEQ ID NO:457, SEQ ID NO:458, SEQ ID NO:459, SEQ ID NO:460, SEQ ID NO:461, SEQ ID NO:462, SEQ ID NO:463, SEQ ID NO:464, SEQ ID NO:465, SEQ ID NO:466, SEQ ID NO:467, SEQ ID NO:468, SEQ ID NO:469, SEQ ID NO:470, SEQ ID NO:471, SEQ ID NO:472, SEQ ID NO:473, SEQ ID NO:474, SEQ ID NO:475, SEQ ID NO:476, SEQ ID NO:477, SEQ ID NO:478, SEQ ID NO:479, SEQ ID NO:480, SEQ ID NO:481, SEQ ID NO:482, SEQ ID NO:483, SEQ ID NO:484, SEQ ID NO:485, SEQ ID NO:486, SEQ ID NO:487, SEQ ID NO:488, SEQ ID NO:489, SEQ ID NO:490, SEQ ID NO:491, SEQ ID NO:492, SEQ ID NO:493, SEQ ID NO:494, SEQ ID NO:495, SEQ ID NO:496, SEQ ID NO:497, SEQ ID NO:498, SEQ ID NO:499, SEQ ID NO:500, SEQ ID NO:501, SEQ ID NO:502, SEQ ID NO:503, SEQ ID NO:504, SEQ ID NO:505, SEQ ID NO:506, SEQ ID NO:507, SEQ ID NO:508, SEQ ID NO:509, SEQ ID NO:510, SEQ ID NO:511, SEQ ID NO:512, SEQ ID NO:513, SEQ ID NO:514, SEQ ID NO:515, SEQ ID NO:516, SEQ ID NO:517, SEQ ID NO:518, SEQ ID NO:519, SEQ ID NO:520, SEQ ID NO:521, SEQ ID NO:522, SEQ ID NO:523, SEQ ID NO:524, SEQ ID DO:525, SEQ ID NO:526, SEQ ID NO:527, SEQ ID NO:528, SEQ ID NO:529, SEQ ID NO:530, SEQ ID NO:531, SEQ ID NO:532, SEQ ID NO:533, SEQ ID NO:534, SEQ ID NO:535, SEQ ID NO:536, SEQ ID NO:537, SEQ ID NO:538, SEQ ID NO:539, SEQ ID NO:540, SEQ ID NO:541, SEQ ID NO:542, SEQ ID NO:543, SEQ ID NO:544, SEQ ID NO:545, SEQ ID NO:546, SEQ ID NO:547, SEQ ID NO:548, SEQ ID NO:549, SEQ ID NO:550, SEQ ID NO:551, SEQ ID NO:552, SEQ ID NO:553, SEQ ID NO:554, SEQ ID NO:555, SEQ ID NO:556, SEQ ID NO:557, SEQ ID NO:558, SEQ ID NO:559, SEQ ID NO:560, SEQ ID NO:561, SEQ ID NO:562, SEQ ID NO:563, SEQ ID NO:564, SEQ ID NO:565, SEQ ID NO:566, SEQ ID NO:567, SEQ ID NO:568, SEQ ID NO:569, SEQ ID NO:570, SEQ ID NO:571, SEQ ID NO:572, SEQ ID NO:573, SEQ ID NO:574, SEQ ID NO:575, SEQ ID NO:576, SEQ ID NO:577, SEQ ID NO:578, SEQ ID NO:579, SEQ ID NO:580, SEQ ID NO:581, SEQ ID NO:582, SEQ ID NO:583, SEQ ID NO:584, SEQ ID NO:585, SEQ ID NO:586, SEQ ID NO:587, SEQ ID NO:588, SEQ ID NO:589, SEQ ID NO:590, SEQ ID NO:591, SEQ ID NO:592;

[0019] or a complement of said sequence.

[0020] In yet other embodiments, the present invention provides an isolated polynucleotide comprising a nucleotide sequence which hybridizes to a sequence selected from the group consisting of:

[0021] SEQ ID NO:1, SEQ ID NO:2, SEQ ID NO:3, SEQ ID NO:4, SEQ ID NO:5, SEQ ID NO:6, SEQ ID NO:7, SEQ ID NO:8, SEQ ID NO:9, SEQ ID NO:10, SEQ ID

[0022] NO:11, SEQ ID NO:12, SEQ ID NO:13, SEQ ID NO:14, SEQ ID NO:15, SEQ ID NO:16, SEQ ID NO:17, SEQ ID NO:18, SEQ ID NO:19, SEQ ID NO:20, SEQ ID NO:21, SEQ ID NO:22, SEQ ID NO:23, SEQ ID NO:24, SEQ ID NO:25, SEQ ID NO:26, SEQ ID NO:27, SEQ ID NO:28, SEQ ID NO:29, SEQ ID NO:30, SEQ ID NO:31, SEQ ID NO:32, SEQ ID NO:33, SEQ ID NO:34, SEQ ID NO:35, SEQ ID NO:36, SEQ ID NO:37, SEQ ID NO:38, SEQ ID NO:39, SEQ ID NO:40, SEQ ID NO:41, SEQ ID NO:42, SEQ ID NO:43, SEQ ID NO:44, SEQ ID NO:45, SEQ ID NO:46, SEQ ID NO:47, SEQ ID NO:48, SEQ ID NO:49, SEQ ID NO:50, SEQ ID NO:51, SEQ ID NO:52, SEQ ID NO:53, SEQ ID NO:54, SEQ ID NO:55, SEQ ID NO:56, SEQ ID NO:57, SEQ ID NO:58, SEQ ID NO:59, SEQ ID NO:60, SEQ ID NO:61, SEQ ID NO:62, SEQ ID NO:63, SEQ ID NO:64, SEQ ID NO:65, SEQ ID NO:66, SEQ ID NO:67, SEQ ID NO:68, SEQ ID NO:69, SEQ ID NO:70, SEQ ID NO:71, SEQ ID NO:72, SEQ ID NO:73, SEQ ID NO:74, SEQ ID NO:75, SEQ ID NO:76, SEQ ID NO:77, SEQ ID NO:78, SEQ ID NO:79, SEQ ID NO:80, SEQ ID NO:81, SEQ ID NO:82, SEQ ID NO:83, SEQ ID NO:84, SEQ ID NO:85, SEQ ID NO:86, SEQ ID NO:87, SEQ ID NO:88, SEQ ID NO:89, SEQ ID NO:90, SEQ ID NO:91, SEQ ID NO:92, SEQ ID NO:93, SEQ ID NO:94, SEQ ID NO:95, SEQ ID NO:96, SEQ ID NO:97, SEQ ID NO:98, SEQ ID NO:99, SEQ ID NO:100, SEQ ID NO:101, SEQ ID NO:102, SEQ ID NO:103, SEQ ID NO:104, SEQ ID NO:105, SEQ ID NO:106, SEQ ID NO:107, SEQ ID NO:108, SEQ ID NO:109, SEQ ID NO:110,

[0023] SEQ ID NO:111, SEQ ID NO:112, SEQ ID NO:113, SEQ ID NO:114, SEQ ID NO:115, SEQ ID NO:116, SEQ ID NO:117, SEQ ID NO:118, SEQ ID NO:119, SEQ

[0024] ID NO:120, SEQ ID NO:121, SEQ ID NO:122, SEQ ID NO:123, SEQ ID NO:124, SEQ ID NO:125, SEQ ID NO:126, SEQ ID NO:127, SEQ ID NO:128, SEQ ID NO:129, SEQ ID NO:130, SEQ ID NO:131, SEQ ID NO:132, SEQ ID NO:133, SEQ

[0025] ID NO:134, SEQ ID NO:135, SEQ ID NO:136, SEQ ID NO:137, SEQ ID NO:138, SEQ ID NO:139, SEQ ID NO:140, SEQ ID NO:141, SEQ ID NO:142, SEQ ID NO:143, SEQ ID NO:144, SEQ ID NO:145, SEQ ID NO:146, SEQ ID NO:147, SEQ ID NO:148, SEQ ID NO:149, SEQ ID NO:150, SEQ ID NO:151, SEQ ID NO:152, SEQ ID NO:153, SEQ ID NO:154, SEQ ID NO:155, SEQ ID NO:156, SEQ ID NO:157, SEQ ID NO:158, SEQ ID NO:159, SEQ ID NO:160, SEQ ID NO:161, SEQ ID NO:162, SEQ ID NO:163, SEQ ID NO:164, SEQ ID NO:165, SEQ ID NO:166, SEQ ID NO:167, SEQ ID NO:168, SEQ ID NO:169, SEQ ID NO:170, SEQ ID NO:171, SEQ ID NO:172, SEQ ID NO:173, SEQ ID NO:174, SEQ ID NO:175, SEQ ID NO:176, SEQ ID NO:177, SEQ ID NO:178, SEQ ID NO:179, SEQ ID NO:180, SEQ ID NO:181, SEQ ID NO:182, SEQ ID NO:183, SEQ ID NO:184, SEQ ID NO:185, SEQ ID NO:186, SEQ ID NO:187, SEQ ID NO:188, SEQ ID NO:189, SEQ ID NO:190, SEQ ID NO:191, SEQ ID NO:192, SEQ ID NO:193, SEQ ID NO:194, SEQ ID NO:195, SEQ ID NO:196, SEQ ID NO:197, SEQ ID NO:198, SEQ ID NO:199, SEQ ID NO:200, SEQ ID NO:201, SEQ ID NO:202, SEQ ID NO:203, SEQ ID NO:204, SEQ ID NO:205, SEQ ID NO:206, SEQ ID NO:207, SEQ ID NO:208, SEQ ID NO:209, SEQ ID NO:210, SEQ ID NO:211, SEQ ID NO:212, SEQ ID NO:213, SEQ ID NO:214, SEQ ID NO:215, SEQ ID NO:216, SEQ ID NO:217, SEQ ID NO:218, SEQ ID NO:219, SEQ ID NO:220, SEQ ID NO:221, SEQ ID NO:222, SEQ ID NO:223, SEQ ID NO:224, SEQ ID NO:225, SEQ ID NO:226, SEQ ID NO:227, SEQ ID NO:228, SEQ ID NO:229, SEQ ID NO:230, SEQ ID NO:231, SEQ ID NO:232, SEQ ID NO:233, SEQ ID NO:234, SEQ ID NO:235, SEQ ID NO:236, SEQ ID NO:237, SEQ ID NO:238, SEQ ID NO:239, SEQ ID NO:240, SEQ ID NO:241, SEQ ID NO:242, SEQ ID NO:243, SEQ ID NO:244, SEQ ID NO:245, SEQ ID NO:246, SEQ ID NO:247, SEQ ID NO:248, SEQ ID NO:249, SEQ ID NO:250, SEQ ID NO:251, SEQ ID NO:252, SEQ ID NO:253, SEQ ID NO:254, SEQ ID NO:255, SEQ ID NO:256, SEQ ID NO:257, SEQ ID NO:258, SEQ ID NO:259, SEQ ID NO:260, SEQ ID NO:261, SEQ ID NO:262, SEQ ID NO:263, SEQ ID NO:264, SEQ ID NO:265, SEQ ID NO:266, SEQ ID NO:267, SEQ ID NO:268, SEQ ID NO:269, SEQ ID NO:270, SEQ ID NO:271, SEQ ID NO:272, SEQ ID NO:273, SEQ ID NO:274, SEQ ID NO:275, SEQ ID NO:276, SEQ ID NO:277, SEQ ID NO:278, SEQ ID NO:279, SEQ ID NO:280, SEQ ID NO:281, SEQ ID NO:282, SEQ ID NO:283, SEQ ID NO:284, SEQ ID NO:285, SEQ ID NO:286, SEQ ID NO:287, SEQ ID NO:288, SEQ ID NO:289, SEQ ID NO:290, SEQ ID NO:291, SEQ ID NO:292, SEQ ID NO:293, SEQ ID NO:294, SEQ ID NO:295, SEQ ID NO:296, SEQ ID NO:297, SEQ ID NO:298, SEQ ID NO:299, SEQ ID NO:300, SEQ ID NO:301, SEQ ID NO:302, SEQ ID NO:303, SEQ ID NO:304, SEQ ID NO:305, SEQ ID NO:306, SEQ ID NO:307, SEQ ID NO:308, SEQ ID NO:309, SEQ ID NO:310, SEQ ID NO:311, SEQ ID NO:312, SEQ ID NO:313, SEQ ID NO:314, SEQ ID NO:315, SEQ ID NO:316, SEQ ID NO:317, SEQ ID NO:318, SEQ ID NO:319, SEQ ID NO:320, SEQ ID NO:321, SEQ ID NO:322, SEQ ID NO:323, SEQ ID NO:324, SEQ ID NO:325, SEQ ID NO:326, SEQ ID NO:327, SEQ ID NO:328, SEQ ID NO:329, SEQ ID NO:330, SEQ ID NO:331, SEQ ID NO:332, SEQ ID NO:333, SEQ ID NO:334, SEQ ID NO:335, SEQ ID NO:336, SEQ ID NO:337, SEQ ID NO:338, SEQ ID NO:339, SEQ ID NO:340, SEQ ID NO:341, SEQ ID NO:342, SEQ ID NO:343, SEQ ID NO:344, SEQ ID NO:345, SEQ ID NO:346, SEQ ID NO:347, SEQ ID NO:348, SEQ ID NO:349, SEQ ID NO:350, SEQ ID NO:351, SEQ ID NO:352, SEQ ID NO:353, SEQ ID NO:354, SEQ ID NO:355, SEQ ID NO:356, SEQ ID NO:357, SEQ ID NO:358, SEQ ID NO:359, SEQ ID NO:360, SEQ ID NO:361, SEQ ID NO:362, SEQ ID NO:363, SEQ ID NO:364, SEQ ID NO:365, SEQ ID NO:366, SEQ ID NO:367, SEQ ID NO:368, SEQ ID NO:369, SEQ ID NO:370, SEQ ID NO:371, SEQ ID NO:372, SEQ ID NO:373, SEQ ID NO:374, SEQ ID NO:375, SEQ ID NO:376, SEQ ID NO:377, SEQ ID NO:378, SEQ ID NO:379, SEQ ID NO:380, SEQ ID NO:381, SEQ ID NO:382, SEQ ID NO:383, SEQ ID NO:384, SEQ ID NO:385, SEQ ID NO:386, SEQ ID NO:387, SEQ ID NO:388, SEQ ID NO:389, SEQ ID NO:390, SEQ ID NO:391, SEQ ID NO:392, SEQ ID NO:393, SEQ ID NO:394, SEQ ID NO:395, SEQ ID NO:396, SEQ ID NO:397, SEQ ID NO:398, SEQ ID NO:399, SEQ ID NO:400, SEQ ID NO:401, SEQ ID NO:402, SEQ ID NO:403, SEQ ID NO:404, SEQ ID NO:405, SEQ ID NO:406, SEQ ID NO:407, SEQ ID NO:408, SEQ ID NO:409, SEQ ID NO:410, SEQ ID NO:411, SEQ ID NO:412, SEQ ID NO:413, SEQ ID NO:414, SEQ ID NO:415, SEQ ID NO:416, SEQ ID NO:417, SEQ ID NO:418, SEQ ID NO:419, SEQ ID NO:420, SEQ ID NO:421, SEQ ID NO:422, SEQ ID NO:423, SEQ ID NO:424, SEQ ID NO:425, SEQ ID NO:426, SEQ ID NO:427, SEQ ID NO:428, SEQ ID NO:429, SEQ ID NO:430, SEQ ID NO:431, SEQ ID NO:432, SEQ ID NO:433, SEQ ID NO:434, SEQ ID NO:435, SEQ ID NO:436, SEQ ID NO:437, SEQ ID NO:438, SEQ ID NO:439, SEQ ID NO:440, SEQ ID NO:441, SEQ ID NO:442, SEQ ID NO:443, SEQ ID NO:444, SEQ ID NO:445, SEQ ID NO:446, SEQ ID NO:447, SEQ ID NO:448, SEQ ID NO:449, SEQ ID NO:450, SEQ ID NO:451, SEQ ID NO:452, SEQ ID NO:453, SEQ ID NO:454, SEQ ID NO:455, SEQ ID NO:456, SEQ ID NO:457, SEQ ID NO:458, SEQ ID NO:459, SEQ ID NO:460, SEQ ID NO:461, SEQ ID NO:462, SEQ ID NO:463, SEQ ID NO:464, SEQ ID NO:465, SEQ ID NO:466, SEQ ID NO:467, SEQ ID NO:468, SEQ ID NO:469, SEQ ID NO:470, SEQ ID NO:471, SEQ ID NO:472, SEQ ID NO:473, SEQ ID NO:474, SEQ ID NO:475, SEQ ID NO:476, SEQ ID NO:477, SEQ ID NO:478, SEQ ID NO:479, SEQ ID NO:480, SEQ ID NO:481, SEQ ID NO:482, SEQ ID NO:483, SEQ ID NO:484, SEQ ID NO:485, SEQ ID NO:486, SEQ ID NO:487, SEQ ID NO:488, SEQ ID NO:489, SEQ ID NO:490, SEQ ID NO:491, SEQ ID NO:492, SEQ ID NO:493, SEQ ID NO:494, SEQ ID NO:495, SEQ ID NO:496, SEQ ID NO:497, SEQ ID NO:498, SEQ ID NO:499, SEQ ID NO:500, SEQ ID NO:501, SEQ ID NO:502, SEQ ID NO:503, SEQ ID NO:504, SEQ ID NO:505, SEQ ID NO:506, SEQ ID NO:507, SEQ ID NO:508, SEQ ID NO:509, SEQ ID NO:510, SEQ ID NO:511, SEQ ID NO:512, SEQ ID NO:513, SEQ ID NO:514, SEQ ID NO:515, SEQ ID NO:516, SEQ ID NO:517, SEQ ID NO:518, SEQ ID NO:519, SEQ ID NO:520, SEQ ID NO:521, SEQ ID NO:522, SEQ ID NO:523, SEQ ID NO:524, SEQ ID NO:525, SEQ ID NO:526, SEQ ID NO:527, SEQ ID NO:528, SEQ ID NO:529, SEQ ID NO:530, SEQ ID NO:531, SEQ ID NO:532, SEQ ID NO:533, SEQ ID NO:534, SEQ ID NO:535, SEQ ID NO:536, SEQ ID NO:537, SEQ ID NO:538, SEQ ID NO:539, SEQ ID NO:540, SEQ ID NO:541, SEQ ID NO:542, SEQ ID NO:543, SEQ ID NO:544, SEQ ID NO:545, SEQ ID NO:546, SEQ ID NO:547, SEQ ID NO:548, SEQ ID NO:549, SEQ ID NO:550, SEQ ID NO:551, SEQ ID NO:552, SEQ ID NO:553, SEQ ID NO:554, SEQ ID NO:555, SEQ ID NO:556, SEQ ID NO:557, SEQ ID NO:558, SEQ ID NO:559, SEQ ID NO:560, SEQ ID NO:561, SEQ ID NO:562, SEQ ID NO:563, SEQ ID NO:564, SEQ ID NO:565, SEQ ID NO:566, SEQ ID NO:567, SEQ ID NO:568, SEQ ID NO:569, SEQ ID NO:570, SEQ ID NO:571, SEQ ID NO:572, SEQ ID NO:573, SEQ ID NO:574, SEQ ID NO:575, SEQ ID NO:576, SEQ ID NO:577, SEQ ID NO:578, SEQ ID NO:579, SEQ ID NO:580, SEQ ID NO:581, SEQ ID NO:582, SEQ ID NO:583, SEQ ID NO:584, SEQ ID NO:585, SEQ ID NO:586, SEQ ID NO:587, SEQ ID NO:588, SEQ ID NO:589, SEQ ID NO:590, SEQ ID NO:591, SEQ ID NO:592;

[0026] or to a complement of said sequence.

[0027] The invention also provides for proteins encoded by the above-described polynucleotides. In certain preferred embodiments, the polynucleotide is operably linked to an expression control sequence. The invention also provides a host cell, including bacterial, yeast, insect and mammalian cells, transformed with such polynucleotide compositions. Also provided by the present invention are organisms that have enhanced, reduced, or modified expression of the gene(s) corresponding to the polynucleotide sequences disclosed herein.

[0028] Processes are also provided for producing a protein, which comprise:

[0029] (a) growing a culture of the host cell transformed with such polynucleotide compositions in a suitable culture medium; and

[0030] (b) purifying the protein from the culture.

[0031] The protein produced according to such methods is also provided by the present invention.

[0032] Protein compositions of the present invention may further comprise a pharmaceutically acceptable carrier. Compositions comprising an antibody which specifically reacts with such protein are also provided by the present invention.

[0033] Methods are also provided for preventing, treating or ameliorating a medical condition which comprises administering to a mammalian subject a therapeutically effective amount of a composition comprising a protein of the present invention, and/or a polynucleotide of the present invention, and a pharmaceutically acceptable carrier.

### DETAILED DESCRIPTION

[0034] The nucleotide sequences of the isolated cDNAs of the present invention are reported in the Sequence Listing below. Table 2 lists the “Clone ID Nos.” assigned by applicants to each SEQ ID NO: in the Sequence Listing.

[0035] Table 2

[0036] Each pair of entries in this table consists of the SEQ ID NO (e.g., 1, 2, etc.) followed by the Clone ID No. for such sequence (e.g., YL233_{—}1, YL234_{—}1, etc.).

| | | | | | |
|---|---|---|---|---|---|
| 1 | YL233_1 | 201 | YR14_1 | 401 | YT161_1 |
| 2 | YL234_1 | 202 | YR15_1 | 402 | YT16_1 |
| 3 | YL235_1 | 203 | YR16_1 | 403 | YT17_1 |
| 4 | YL236_1 | 204 | YR18_1 | 404 | YT18_1 |
| 5 | YL237_1 | 205 | YR19_1 | 405 | YT19_1 |
| 6 | YL238_1 | 206 | YR1_1 | 406 | YT1_1 |
| 7 | YL239_1 | 207 | YR20_1 | 407 | YT20_1 |
| 8 | YL23_1 | 208 | YR22_1 | 408 | YT21_1 |
| 9 | YL240_1 | 209 | YR23_1 | 409 | YT22_1 |
| 10 | YL241_1 | 210 | YR25_1 | 410 | YT23_1 |
| 11 | YL242_1 | 211 | YR26_1 | 411 | YT24_1 |
| 12 | YL244_1 | 212 | YR27_1 | 412 | YT25_1 |
| 13 | YL245_1 | 213 | YR28_1 | 413 | YT26_1 |
| 14 | YL246_1 | 214 | YR29_1 | 414 | YT27_1 |
| 15 | YL247_1 | 215 | YR2_1 | 415 | YT28_1 |
| 16 | YL248_1 | 216 | YR31_1 | 416 | YT29_1 |
| 17 | YL249_1 | 217 | YR34_1 | 417 | YT2_1 |
| 18 | YL24_1 | 218 | YR3_1 | 418 | YT30_1 |
| 19 | YL250_1 | 219 | YR4_1 | 419 | YT31_1 |
| 20 | YL251_1 | 220 | YR5_1 | 420 | YT32_1 |
| 21 | YL252_1 | 221 | YR6_1 | 421 | YT33_1 |
| 22 | YL254_1 | 222 | YR7_1 | 422 | YT34_1 |
| 23 | YL255_1 | 223 | YR9_1 | 423 | YT35_1 |
| 24 | YL256_1 | 224 | YS100_1 | 424 | YT36_1 |
| 25 | YL257_1 | 225 | YS104_1 | 425 | YT37_1 |
| 26 | YL258_1 | 226 | YS105_1 | 426 | YT38_1 |
| 27 | YL259_1 | 227 | YS106_1 | 427 | YT39_1 |
| 28 | YL25_1 | 228 | YS107_1 | 428 | YT3_1 |
| 29 | YL260_1 | 229 | YS108_1 | 429 | YT40_1 |
| 30 | YL261_1 | 230 | YS110_1 | 430 | YT41_1 |
| 31 | YL262_1 | 231 | YS111_1 | 431 | YT42_1 |
| 32 | YL263_1 | 232 | YS113_1 | 432 | YT43_1 |
| 33 | YL264_1 | 233 | YS114_1 | 433 | YT44_1 |
| 34 | YL265_1 | 234 | YS116_1 | 434 | YT45_1 |
| 35 | YL266_1 | 235 | YS117_1 | 435 | YT46_1 |
| 36 | YL267_1 | 236 | YS118_1 | 436 | YT47_1 |
| 37 | YL268_1 | 237 | YS119_1 | 437 | YT48_1 |
| 38 | YL269_1 | 238 | YS11_1 | 438 | YT4_1 |
| 39 | YL26_1 | 239 | YS120_1 | 439 | YT51_1 |
| 40 | YL270_1 | 240 | YS121_1 | 440 | YT52_1 |
| 41 | YL271_1 | 241 | YS122_1 | 441 | YT53_1 |
| 42 | YL272_1 | 242 | YS123_1 | 442 | YT56_1 |
| 43 | YL273_1 | 243 | YS124_1 | 443 | YT57_1 |
| 44 | YL274_1 | 244 | YS126_1 | 444 | YT59_1 |
| 45 | YL275_1 | 245 | YS127_1 | 445 | YT5_1 |
| 46 | YL276_1 | 246 | YS128_1 | 446 | YT61_1 |
| 47 | YL277_1 | 247 | YS129_1 | 447 | YT63_1 |
| 48 | YL278_1 | 248 | YS130_1 | 448 | YT64_1 |
| 49 | YL279_1 | 249 | YS147_1 | 449 | YT66_1 |
| 50 | YL27_1 | 250 | YS149_1 | 450 | YT67_1 |
| 51 | YL280_1 | 251 | YS14_1 | 451 | YT68_1 |
| 52 | YL281_1 | 252 | YS152_1 | 452 | YT69_1 |
| 53 | YL282_1 | 253 | YS153_1 | 453 | YT6_1 |
| 54 | YL283_1 | 254 | YS154_1 | 454 | YT70_1 |
| 55 | YL287_1 | 255 | YS155_1 | 455 | YT71_1 |
| 56 | YL288_1 | 256 | YS156_1 | 456 | YT72_1 |
| 57 | YL289_1 | 257 | YS157_1 | 457 | YT73_1 |
| 58 | YL28_1 | 258 | YS158_1 | 458 | YT74_1 |
| 59 | YL290_1 | 259 | YS159_1 | 459 | YT75_1 |
| 60 | YL291_1 | 260 | YS15_1 | 460 | YT76_1 |
| 61 | YL293_1 | 261 | YS160_1 | 461 | YT77_1 |
| 62 | YL294_1 | 262 | YS161_1 | 462 | YT78_1 |
| 63 | YL295_1 | 263 | YS162_1 | 463 | YT79_1 |
| 64 | YL296_1 | 264 | YS163_1 | 464 | YT7_1 |
| 65 | YL297_1 | 265 | YS164_1 | 465 | YT81_1 |
| 66 | YL29_1 | 266 | YS165_1 | 466 | YT84_1 |
| 67 | YL2_1 | 267 | YS166_1 | 467 | YT85_1 |
| 68 | YL300_1 | 268 | YS167_1 | 468 | YT88_1 |
| 69 | YL301_1 | 269 | YS168_1 | 469 | YT89_1 |
| 70 | YL302_1 | 270 | YS169_1 | 470 | YT8_1 |
| 71 | YL306_1 | 271 | YS16_1 | 471 | YT90_1 |
| 72 | YL308_1 | 272 | YS170_1 | 472 | YT91_1 |
| 73 | YL30_1 | 273 | YS171_1 | 473 | YT96_1 |
| 74 | YL311_1 | 274 | YS172_1 | 474 | YT97_1 |
| 75 | YL314_1 | 275 | YS173_1 | 475 | YT9_1 |
| 76 | YL317_1 | 276 | YS174_1 | 476 | YU103_1 |
| 77 | YL318_1 | 277 | YS175_1 | 477 | YU104_1 |
| 78 | YL31_1 | 278 | YS176_1 | 478 | YU11_1 |
| 79 | YL32_1 | 279 | YS177_1 | 479 | YU13_1 |
| 80 | YL33_1 | 280 | YS179_1 | 480 | YU16_1 |
| 81 | YL34_1 | 281 | YS17_1 | 481 | YU17_1 |
| 82 | YL35_1 | 282 | YS180_1 | 482 | YU18_1 |
| 83 | YL36_1 | 283 | YS181_1 | 483 | YU19_1 |
| 84 | YL37_1 | 284 | YS182_1 | 484 | YU1_1 |
| 85 | YL39_1 | 285 | YS183_1 | 485 | YU20_1 |
| 86 | YL3_1 | 286 | YS184_1 | 486 | YU21_1 |
| 87 | YL40_1 | 287 | YS18_1 | 487 | YU26_1 |
| 88 | YL41_1 | 288 | YS19_1 | 488 | YU28_1 |
| 89 | YL42_1 | 289 | YS1_1 | 489 | YU31_1 |
| 90 | YL44_1 | 290 | YS21_1 | 490 | YU32_1 |
| 91 | YL45_1 | 291 | YS22_1 | 491 | YU33_1 |
| 92 | YL46_1 | 292 | YS23_1 | 492 | YU36_1 |
| 93 | YL47_1 | 293 | YS24_1 | 493 | YU3_1 |
| 94 | YL48_1 | 294 | YS25_1 | 494 | YU41_1 |
| 95 | YL4_1s | 295 | YS26_1 | 495 | YU42_1 |
| 96 | YL50_1 | 296 | YS27_1 | 496 | YU43_1 |
| 97 | YL51_1 | 297 | YS28_1 | 497 | YU46_1 |
| 98 | YL52_1 | 298 | YS29_1 | 498 | YU47_1 |
| 99 | YL53_1 | 299 | YS2_1 | 499 | YU48_1 |
| 100 | YL54_1 | 300 | YS30_1 | 500 | YU49_1 |
| 101 | YL55_1 | 301 | YS31_1 | 501 | YU4_1 |
| 102 | YL56_1 | 302 | YS32_1 | 502 | YU52_1 |
| 103 | YL57_1 | 303 | YS33_1 | 503 | YU53_1 |
| 104 | YL58_1 | 304 | YS34_1 | 504 | YU54_1 |
| 105 | YL59_1 | 305 | YS35_1 | 505 | YU55_1 |
| 106 | YL5_1 | 306 | YS36_1 | 506 | YU56_1 |
| 107 | YL60_1 | 307 | YS37_1 | 507 | YU57_1 |
| 108 | YL61_1 | 308 | YS38_1 | 508 | YU5_1 |
| 109 | YL62_1 | 309 | YS39_1 | 509 | YU60_1 |
| 110 | YL63_1 | 310 | YS40_1 | 510 | YU6_1 |
| 111 | YL64_1 | 311 | YS41_1 | 511 | YU76_1 |
| 112 | YL65_1 | 312 | YS42_1 | 512 | YU77_1 |
| 113 | YL66_1 | 313 | YS46_1 | 513 | YU78_1 |
| 114 | YL67_1 | 314 | YS47_1 | 514 | YU79_1 |
| 115 | YL68_1 | 315 | YS48_1 | 515 | YU7_1 |
| 116 | YL69_1 | 316 | YS49_1 | 516 | YU80_1 |
| 117 | YL6_1 | 317 | YS4_1 | 517 | YU81_1 |
| 118 | YL70_1 | 318 | YS50_1 | 518 | YU82_1 |
| 119 | YL71_1 | 319 | YS51_1 | 519 | YU83_1 |
| 120 | YL72_1 | 320 | YS52_1 | 520 | YU84_1 |
| 121 | YL73_1 | 321 | YS53_1 | 521 | YU85_1 |
| 122 | YL74_1 | 322 | YS54_1 | 522 | YU86_1 |
| 123 | YL75_1 | 323 | YS55_1 | 523 | YU87_1 |
| 124 | YL76_1 | 324 | YS58_1 | 524 | YU88_1 |
| 125 | YL77_1 | 325 | YS59_1 | 525 | YU89_1 |
| 126 | YL78_1 | 326 | YS5_1 | 526 | YU8_1 |
| 127 | YL79_1 | 327 | YS60_1 | 527 | YU90_1 |
| 128 | YL7_1 | 328 | YS61_1 | 528 | YU91_1 |
| 129 | YL80_1 | 329 | YS62_1 | 529 | YU92_1 |
| 130 | YL81_1 | 330 | YS63_1 | 530 | YU93_1 |
| 131 | YL82_1 | 331 | YS64_1 | 531 | YU94_1 |
| 132 | YL83_1 | 332 | YS65_1 | 532 | YU95_1 |
| 133 | YL84_1 | 333 | YS66_1 | 533 | YU96_1 |
| 134 | YL85_1 | 334 | YS68_1 | 534 | YU97_1 |
| 135 | YL86_1 | 335 | YS69_1 | 535 | YU9_1 |
| 136 | YL87_1 | 336 | YS6_1 | 536 | YV1_1 |
| 137 | YL88_1 | 337 | YS70_1 | 537 | YV2_1 |
| 138 | YL89_1 | 338 | YS71_1 | 538 | YV3_1 |
| 139 | YL8_1 | 339 | YS72_1 | 539 | YV4_1 |
| 140 | YL90_1 | 340 | YS73_1 | 540 | YV5_1 |
| 141 | YL91_1 | 341 | YS74_1 | 541 | YW10_1 |
| 142 | YL92_1 | 342 | YS75_1 | 542 | YW11_1 |
| 143 | YL93_1 | 343 | YS77_1 | 543 | YW12_1 |
| 144 | YL94_1 | 344 | YS79_1 | 544 | YW13_1 |
| 145 | YL95_1 | 345 | YS7_1 | 545 | YW14_1 |
| 146 | YL96_1 | 346 | YS80_1 | 546 | YW15_1 |
| 147 | YL97_1 | 347 | YS81_1 | 547 | YW1_1 |
| 148 | YL98_1 | 348 | YS83_1 | 548 | YW2_1 |
| 149 | YL99_1 | 349 | YS86_1 | 549 | YW3_1 |
| 150 | YLA1_1 | 350 | YS87_1 | 550 | YW4_1 |
| 151 | YM10_1 | 351 | YS88_1 | 551 | YW5_1 |
| 152 | YM11_1 | 352 | YS89_1 | 552 | YW6_1 |
| 153 | YM12_1 | 353 | YS8_1 | 553 | YW7_1 |
| 154 | YM13_1 | 354 | YS90_1 | 554 | YW8_1 |
| 155 | YM14_1 | 355 | YS91_1 | 555 | YW9_1 |
| 156 | YM15_1 | 356 | YS92_1 | 556 | YX1_1 |
| 157 | YM16_1 | 357 | YS93_1 | 557 | YX2_1 |
| 158 | YM17_1 | 358 | YS94_1 | 558 | YX3_1 |
| 159 | YM18_1 | 359 | YS97_1 | 559 | YX4_1 |
| 160 | YM19_1 | 360 | YS98_1 | 560 | YY12_1 |
| 161 | YM1_1 | 361 | YS99_1 | 561 | YY13_1 |
| 162 | YM23_1 | 362 | YS9_1 | 562 | YY15_1 |
| 163 | YM2_1 | 363 | YT101_1 | 563 | YY16_1 |
| 164 | YM3_1 | 364 | YT10_1 | 564 | YY17_1 |
| 165 | YM5_1 | 365 | YT116_1 | 565 | YY18_1 |
| 166 | YM6_1 | 366 | YT117_1 | 566 | YY19_1 |
| 167 | YM7_1 | 367 | YT118_1 | 567 | YY1_1 |
| 168 | YM8_1 | 368 | YT11_1 | 568 | YY2_1 |
| 169 | YM9_1 | 369 | YT120_1 | 569 | YY3_1 |
| 170 | YMA1_1 | 370 | YT12_1 | 570 | YY5_1 |
| 171 | YN10_1 | 371 | YT133_1 | 571 | YY9_1 |
| 172 | YN1_1 | 372 | YT134_1 | 572 | YZ10_1 |
| 173 | YN2_1 | 373 | YT135_1 | 573 | YZ14_1 |
| 174 | YN3_1 | 374 | YT136_1 | 574 | YZ16_1 |
| 175 | YN4_1 | 375 | YT137_1 | 575 | YZ17_1 |
| 176 | YN5_1 | 376 | YT138_1 | 576 | YZ18_1 |
| 177 | YN6_1 | 377 | YT139_1 | 577 | YZ1_1 |
| 178 | YN7_1 | 378 | YT13_1 | 578 | YZ24_1 |
| 179 | YN8_1 | 379 | YT140_1 | 579 | YZ25_1 |
| 180 | YN9_1 | 380 | YT141_1 | 580 | YZ2_1 |
| 181 | YNA1_1 | 381 | YT142_1 | 581 | YZ36_1 |
| 182 | YO1_1 | 382 | YT143_1 | 582 | YZ3_1 |
| 183 | YO2_1 | 383 | YT144_1 | 583 | YZ41_1 |
| 184 | YO3_1 | 384 | YT145_1 | 584 | YZ42_1 |
| 185 | YO4_1 | 385 | YT146_1 | 585 | YZ43_1 |
| 186 | YO5_1 | 386 | YT147_1 | 586 | YZ44_1 |
| 187 | YO6_1 | 387 | YT148_1 | 587 | YZ45_1 |
| 188 | YP1_1 | 388 | YT149_1 | 588 | YZ4_1 |
| 189 | YP2_1 | 389 | YT150_1 | 589 | YZ5_1 |
| 190 | YP3_1 | 390 | YT151_1 | 590 | YZ6_1 |
| 191 | YP4_1 | 391 | YT152_1 | 591 | YZ7_1 |
| 192 | YP5_1 | 392 | YT153_1 | 592 | YZ8_1 |
| 193 | YP6_1 | 393 | YT154_1 | | |
| 194 | YP7_1 | 394 | YT155_1 | | |
| 195 | YQ1_1 | 395 | YT156_1 | | |
| 196 | YQ2_1 | 396 | YT157_1 | | |
| 197 | YQ3_1 | 397 | YT158_1 | | |
| 198 | YQ4_1 | 398 | YT159_1 | | |
| 199 | YQ5_1 | 399 | YT15_1 | | |
| 200 | YR13_1 | 400 | YT160_1 | | |

[0037] The “Clone ID No.” for a particular clone consists of one or two letters followed umber. The letters designate the tissue source from which the cDNA for that was isolated, and these sources are listed in Table 3 below.

TABLE 3

| Sel. | Species | Stage | Tissue | Cell Type | Treatment |
|---|---|---|---|---|---|
| YL | Human | Adult | Spleen | N/A | None |
| YLA | Human | Adult | Bladder | 5637 carcinoma line | PMA+untreated |
| YM | Human | Adult | Spleen | N/A | None |
| YMA | Human | Adult | Thymus | N/A | None |
| YN | Human | Adult | Blood | K562 Chronic ML line | None |
| YNA | Human | Adult | Brain | N/A | None |
| YO | Human | Adult | Blood | PL HL-60 line | None |
| YP | Human | Adult | Nasal | EpitheliumSCC CCL-30 line | None |
| YQ | Human | Adult | Neuronal | Neuroblastoma CRL2060 line | None |
| YR | Human | Adult | Fibrosarcoma | Epithelial HT-1080 line | None |
| YS | Human | Adult | Thymus | N/A | None |
| YT | Human | Adult | Retina | WERI-Rb1 retinoblastoma line | None |
| YU | Human | Adult | Uterus | HeLa carcinoma line | PMA 2 hrs |
| YV | Human | Adult | Blood | U937 histiocytic leukemia line | PMA 2 hrs |
| YW | Human | Adult | Bladder | 5637 carcinoma line | None |
| YX | Human | Fetal | Brain | 21 weeks | None |
| YY | Human | Fetal | Kidney | N/A | None |
| YZ | Human | Adult | Blood | PBMC | PMA 2 hrs |

Table 3 Cell Type and Treatment Key:
ML: myelogenous leukemia
PL: Promyelocytic Leukemia
PMA: phorbol myristate acetate
PMA + untreated: Pool of PMA-treated and untreated cells
PMBC: peripheral blood mononuclear cells
SCC: Squamous cell carcinoma

[0038] Thus, the tissue source for a particular cDNA sequence can be identified in Table 3 by the one and two letter designations used in the relevant “Clone ID No.” in Table 2. For example, a cDNA clone designated as “YL233_{—}1” would have been isolated from a human adult brain library (i.e., selection “YL”) as indicated in Table 3.

[0039] As used herein, “polynucleotide” includes single- and double-stranded RNAs, DNAs and RNA:DNA hybrids.

[0040] As used herein a “secreted” protein is one which, when expressed in a suitable host cell, is transported across or through a membrane, including transport as a result of signal sequences in its amino acid sequence. “Secreted” proteins include without limitation proteins secreted wholly (e.g., soluble proteins) or partially (e.g., receptors) from the cell in which they are expressed. “Secreted” proteins also include without limitation proteins which are transported across the membrane of the endoplasmic reticulum.

[0041] Fragments of the proteins of the present invention which are capable of exhibiting biological activity are also encompassed by the present invention. Fragments of the protein may be in linear form or they may be cyclized using known methods, for example, as described in H. U. Saragovi, et al., Bio/Technology 10, 773-778 (1992) and in R. S. McDowell, et al., J. Amer. Chem. Soc. 114, 9245-9253 (1992), both of which are incorporated herein by reference. Such fragments may be fused to carrier molecules such as immunoglobulins for many purposes, including increasing the valency of protein binding sites. For example, fragments of the protein may be fused through “linker” sequences to the Fc portion of an immunoglobulin. For a bivalent form of the protein, such a fusion could be to the Fc portion of an IgG molecule. Other immunoglobulin isotypes may also be used to generate such fusions. For example, a protein—IgM fusion would generate a decavalent form of the protein of the invention.

[0042] The present invention also provides both full-length and mature forms of the disclosed proteins. The full-length form of the such proteins is identified in the sequence listing by translation of the nucleotide sequence of each disclosed clone. The mature form(s) of such protein may be obtained by expression of the disclosed full-length polynucleotide (preferably those deposited with ATCC) in a suitable mammalian cell or other host cell. The sequence(s) of the mature form(s) of the protein may also be determinable from the amino acid sequence of the full-length form.

[0043] The present invention also provides genes corresponding to the polynucleotide sequences disclosed herein. “Corresponding genes” are the regions of the genome that are transcribed to produce the mRNAs from which cDNA polynucleotide sequences are derived and may include contiguous regions of the genome necessary for the regulated expression of such genes. Corresponding genes may therefore include but are not limited to coding sequences, 5′ and 3′ untranslated regions, alternatively spliced exons, introns, promoters, enhancers, and silencer or suppressor elements. The corresponding genes can be isolated in accordance with known methods using the sequence information disclosed herein. Such methods include the preparation of probes or primers from the disclosed sequence information for identification and/or amplification of genes in appropriate genomic libraries or other sources of genomic materials. An “isolated gene” is a gene that has been separated from the adjacent coding sequences, if any, present in the genome of the organism from which the gene was isolated.

[0044] The chromosomal location corresponding to the polynucleotide sequences disclosed herein may also be determined, for example by hybridizing appropriately labeled polynucleotides of the present invention to chromosomes in situ. It may also be possible to determine the corresponding chromosomal location for a disclosed polynucleotide by identifying significantly similar nucleotide sequences in public databases, such as expressed sequence tags (ESTs), that have already been mapped to particular chromosomal locations. For at least some of the polynucleotide sequences disclosed herein, public database sequences having at least some similarity to the polynucleotide of the present invention have been listed by database accession number. Searches using the GenBank accession numbers of these public database sequences can then be performed at an Internet site provided by the National Center for Biotechnology Information having the address www.ncbi.nlm.nih.gov/UniGene, in order to identify “UniGene clusters” of overlapping sequences. Many of the “UniGene clusters” so identified will already have been mapped to particular chromosomal sites.

[0045] Organisms that have enhanced, reduced, or modified expression of the gene(s) corresponding to the polynucleotide sequences disclosed herein are provided. The desired change in gene expression can be achieved through the use of antisense polynucleotides or ribozymes that bind and/or cleave the mRNA transcribed from the gene (Albert and Morris, 1994, Trends Pharmacol. Sci. 15(7): 250-254; Lavarosky et al., 1997, Biochem. Mol. Med. 62(1): 11-22; and Hampel, 1998, Prog. Nucleic Acid Res. Mol. Biol. 58: 1-39; all of which are incorporated by reference herein). Transgenic animals that have multiple copies of the gene(s) corresponding to the polynucleotide sequences disclosed herein, preferably produced by transformation of cells with genetic constructs that are stably maintained within the transformed cells and their progeny, are provided. Transgenic animals that have modified genetic control regions that increase or reduce gene expression levels, or that change temporal or spatial patterns of gene expression, are also provided (see European Patent No. 0 649 464 B1, incorporated by reference herein). In addition, organisms are provided in which the gene(s) corresponding to the polynucleotide sequences disclosed herein have been partially or completely inactivated, through insertion of extraneous sequences into the corresponding gene(s) or through deletion of all or part of the corresponding gene(s). Partial or complete gene inactivation can be accomplished through insertion, preferably followed by imprecise excision, of transposable elements (Plasterk, 1992, Bioessays 14(9): 629-633; Zwaal et al., 1993, Proc. Natl. Acad. Sci. USA 90(16): 7431-7435; Clark et al., 1994, Proc. Natl. Acad. Sci. USA 91(2): 719-722; all of which are incorporated by reference herein), or through homologous recombination, preferably detected by positive/negative genetic selection strategies (Mansour et al., 1988, Nature 336: 348-352; U.S. Pat. Nos. 5,464,764; 5,487,992; 5,627,059; 5,631,153; 5,614, 396; 5,616,491; and 5,679,523; all of which are incorporated by reference herein). These organisms with altered gene expression are preferably eukaryotes and more preferably are mammals. Such organisms are useful for the development of non-human models for the study of disorders involving the corresponding gene(s), and for the development of assay systems for the identification of molecules that interact with the protein product(s) of the corresponding gene(s).

[0046] Where the protein of the present invention is membrane-bound (e.g., is a receptor), the present invention also provides for soluble forms of such protein. In such forms part or all of the intracellular and transmembrane domains of the protein are deleted such that the protein is fully secreted from the cell in which it is expressed. The intracellular and transmembrane domains of proteins of the invention can be identified in accordance with known techniques for determination of such domains from sequence information.

[0047] Proteins and protein fragments of the present invention include proteins with amino acid sequence lengths that are at least 25%(more preferably at least 50%, and most preferably at least 75%) of the length of a disclosed protein and have at least 60% sequence identity (more preferably, at least 75% identity; most preferably at least 90% or 95% identity) with that disclosed protein, where sequence identity is determined by comparing the amino acid sequences of the proteins when aligned so as to maximize overlap and identity while minimizing sequence gaps. Also included in the present invention are proteins and protein fragments that contain a segment preferably comprising 8 or more (more preferably 20 or more, most preferably 30 or more) contiguous amino acids that shares at least 75% sequence identity (more preferably, at least 85% identity; most preferably at least 95% identity) with any such segment of any of the disclosed proteins.

[0048] In particular, sequence identity may be determined using WU-BLAST (Washington University BLAST) version 2.0 software, which builds upon WU-BLAST version 1.4, which in turn is based on the public domain NCBI-BLAST version 1.4 (Altschul and Gish, 1996, Local alignment statistics, Doolittle ed., Methods in Enzymology 266: 460-480; Altschul et al., 1990, Basic local alignment search tool, Journal of Molecular Biology 215: 403-410; Gish and States, 1993, Identification of protein coding regions by database similarity search, Nature Genetics 3: 266-272; Karlin and Altschul, 1993, Applications and statistics for multiple high-scoring segments in molecular sequences, Proc. Natl. Acad. Sci. USA 90: 5873-5877; all of which are incorporated by reference herein). WU-BLAST version 2.0 executable programs for several UNIX platforms can be downloaded from the Internet file-transfer protocol (FTP) site ftp://blast.wustl.edu/blast/executables. The complete suite of search programs (BLASTP, BLASTN, BLASTX, TBLASTN, and TBLASTX) is provided at that site, in addition to several support programs. WU-BLAST 2.0 is copyrighted and may not be sold or redistributed in any form or manner without the express written consent of the author; but the posted executables may otherwise be freely used for commercial, nonprofit, or academic purposes. In all search programs in the suite—BLASTP, BLASTN, BLASTX, TBLASTN and TBLASTX—the gapped alignment routines are integral to the database search itself, and thus yield much better sensitivity and selectivity while producing the more easily interpreted output. Gapping can optionally be turned off in all of these programs, if desired. The default penalty (Q) for a gap of length one is Q=9 for proteins and BLASTP, and Q=10 for BLASTN, but may be changed to any integer value including zero, one through eight, nine, ten, eleven, twelve through twenty, twenty-one through fifty, fifty-one through one hundred, etc. The default per-residue penalty for extending a gap (R) is R=2 for proteins and BLASTP, and R=10 for BLASTN, but may be changed to any integer value including zero, one, two, three, four, five, six, seven, eight, nine, ten, eleven, twelve through twenty, twenty-one through fifty, fifty-one through one hundred, etc. Any combination of values for Q and R can be used in order to align sequences so as to maximize overlap and identity while minimizing sequence gaps. The default amino acid comparison matrix is BLOSUM62, but other amino acid comparison matrices such as PAM can be utilized.

[0049] Species homologues of the disclosed polynucleotides and proteins are also provided by the present invention. As used herein, a “species homologue” is a protein or polynucleotide with a different species of origin from that of a given protein or polynucleotide, but with significant sequence similarity to the given protein or polynucleotide. Preferably, polynucleotide species homologues have at least 60% sequence identity (more preferably, at least 75% identity; most preferably at least 90% identity) with the given polynucleotide, and protein species homologues have at least 30% sequence identity (more preferably, at least 45% identity; most preferably at least 60% identity) with the given protein, where sequence identity is determined by comparing the nucleotide sequences of the polynucleotides or the amino acid sequences of the proteins when aligned so as to maximize overlap and identity while minimizing sequence gaps. Species homologues may be isolated and identified by making suitable probes or primers from the sequences provided herein and screening a suitable nucleic acid source from the desired species. Preferably, species homologues are those isolated from mammalian species. Most preferably, species homologues are those isolated from certain mammalian species such as, for example, Pan troglodytes, Gorilla gorilla, Pongo pygmaeus, Hylobates concolor, Macaca mulatta, Papio papio, Papio hamadryas, Cercopithecus aethiops, Cebus capucinus, Aotus trivirgatus, Sanguinus oedipus, Microcebus murinus, Mus musculus, Rattus norvegicus, Cricetulus griseus, Felis catus, Mustela vison, Canis familiaris, Oryctolagus cuniculus, Bos taurus, Ovis aries, Sus scrofa, and Equus caballus, for which genetic maps have been created allowing the identification of syntenic relationships between the genomic organization of genes in one species and the genomic organization of the related genes in another species (O'Brien and Seuanez, 1988, Ann. Rev. Genet. 22: 323-351; O'Brien et al., 1993, Nature Genetics 3:103-112; Johansson et al., 1995, Genomics 25: 682-690; Lyons et al., 1997, Nature Genetics 15: 47-56; O'Brien et al., 1997, Trends in Genetics 13(10): 393-399; Carver and Stubbs, 1997, Genome Research 7:1123-1137; all of which are incorporated by reference herein).

[0050] The invention also encompasses allelic variants of the disclosed polynucleotides or proteins; that is, naturally-occurring alternative forms of the isolated polynucleotides which also encode proteins which are identical or have significantly similar sequences to those encoded by the disclosed polynucleotides. Preferably, allelic variants have at least 60% sequence identity (more preferably, at least 75% identity; most preferably at least 90% identity) with the given polynucleotide, where sequence identity is determined by comparing the nucleotide sequences of the polynucleotides when aligned so as to maximize overlap and identity while minimizing sequence gaps. Allelic variants may be isolated and identified by making suitable probes or primers from the sequences provided herein and screening a suitable nucleic acid source from individuals of the appropriate species.

[0051] The invention also includes polynucleotides with sequences complementary to those of the polynucleotides disclosed herein.

[0052] The present invention also includes polynucleotides that hybridize under reduced stringency conditions, more preferably stringent conditions, and most preferably highly stringent conditions, to polynucleotides described herein. Examples of stringency conditions are shown in the table below: highly stringent conditions are those that are at least as stringent as, for example, conditions A-F; stringent conditions are at least as stringent as, for example, conditions G-L; and reduced stringency conditions are at least as stringent as, for example, conditions M-R.

| | | Hybrid | | Wash |
|---|---|---|---|---|
| Stringency | Polynucleotide | Length | Hybridization Temperature and | Temperature |
| Condition | Hybrid | (bp)‡ | Buffer† | and Buffer† |
| A | DNA:DNA | ≧50 | 65° C.; 1 × SSC -or- | 65° C.; 0.3 × SSC |
| | | | 42° C.; 1 × SSC, 50% formamide | |
| B | DNA:DNA | <50 | T_{B}*; 1 × SSC | T_{B}*; 1 × SSC |
| C | DNA:RNA | ≧50 | 67° C.; 1 × SSC -or- | 67° C.; O.3 × SSC |
| | | | 45° C.; 1 × SSC, 50% formamide | |
| D | DNA:RNA | <50 | T_{D}*; 1 × SSC | T_{D}*; 1 × SSC |
| E | RNA:RNA | ≧50 | 70° C.; 1 × SSC -or- | 70° C.; 0.3 × SSC |
| | | | 50° C.; 1 × SSC, 50% formamide | |
| F | RNA:RNA | <50 | T_{F}*; 1 × SSC | TF*; 1 × SSC |
| G | DNA:DNA | ≧50 | 65° C.; 4 × SSC -or- | 65° C.; 1 × SSC |
| | | | 42° C.; 4 × SSC, 50% formamide | |
| H | DNA:DNA | <50 | T_{H}*; 4 × SSC | T_{H}*; 4 × SSC |
| I | DNA:RNA | ≧50 | 67° C.; 4 × SSC -or- | 67° C.; 1 × SSC |
| | | | 45° C.; 4 × SSC, 50% formamide | |
| J | DNA:RNA | <50 | T_{J}*; 4 × SSC | T_{J}*; 4 × SSC |
| K | RNA:RNA | ≧50 | 70° C.; 4 × SSC -or- | 67° C.; 1 × SSC |
| | | | 50° C.; 4 × SSC, 50% formamide | |
| L | RNA:RNA | <50 | T_{L}*; 2 × SSC | T_{L}*; 2 × SSC |
| M | DNA:DNA | ≧50 | 50° C.; 4 × SSC -or- | 50° C.; 2 × SSC |
| | | | 40° C.; 6 × SSC, 50% formamide | |
| N | DNA:DNA | <50 | T_{N}*; 6 × SSC | T_{N}*; 6 × SSC |
| O | DNA:RNA | ≧50 | 55° C.; 4 × SSC -or- | 55° C.; 2 × SSC |
| | | | 42° C.; 6 × SSC, 50% formamide | |
| P | DNA:RNA | <50 | T_{P}*; 6 × SSC | T_{P}*; 6 × SSC |
| Q | RNA:RNA | ≧50 | 60° C.; 4 × SSC -or- | 60° C.; 2 × SSC |
| | | | 45° C.; 6 × SSC, 50% formamide | |
| R | RNA:RNA | <50 | T_{R}*; 4 × SSC | T_{R}*; 4 × SSC |
| ‡: The hybrid length is that anticipated for the hybridized region(s) of the hybridizing polynucleotides. When hybridizing a polynucleotide to a target polynucleotide of unknown sequence, the hybrid length is assumed to be that of the hybridizing polynucleotide. When polynucleotides of known sequence are hybridized, the hybrid length can be determined by aligning the sequences of the polynucleotides and identifying the region or regions of optimal sequence complementarity. | | | | |
| †: SSPE (1 × SSPE is 0.15M NaCl, 10mM NaH₂PO₄, and 1.25mM EDTA, pH 7.4) can be substituted for SSC (1 × SSC is 0.15M NaCl and 15mM sodium citrate) in the hybridization and wash buffers; washes are performed for 15 minutes after hybridization is complete. | | | | |
| *T_{B}-T_{R}: The hybridization temperature for hybrids anticipated to be less than 50 base pairs in length should be 5-10° C. less than the melting temperature (Tₘ) of the hybrid, where Tₘ is determined according to the following equations. For hybrids less than 18 base pairs in length, Tₘ(° C.) = 2(# of A + T bases) + 4(# of G + C bases). For hybrids between 18 and 49 base pairs in length, | | | | |
| # Tₘ(° C.) = 81.5 + 16.6(log₁₀[Na⁻]) + 0.41(% G + C) − (600/N), Where N is the number of bases in the hybrid, and [Na⁻] is the concentration of sodium ions in the hybridization buffer ([Na⁺] for 1 × SSC = 0.165 M). | | | | |

[0053] Additional examples of stringency conditions for polynucleotide hybridization are provided in Sambrook, J., E. F. Fritsch, and T. Maniatis, 1989, Molecular Cloning: A Laboratory Manual, Cold Spring Harbor Laboratory Press, Cold Spring Harbor, N.Y., chapters 9 and 11, and Current Protocols in Molecular Biology, 1995, F. M. Ausubel et al., eds., John Wiley & Sons, Inc., sections 2.10 and 6.3-6.4, incorporated herein by reference.

[0054] Preferably, each such hybridizing polynucleotide has a length that is at least 25% (more preferably at least 50%, and most preferably at least 75%) of the length of the polynucleotide of the present invention to which it hybridizes, and has at least 60% sequence identity (more preferably, at least 75% identity; most preferably at least 90% or 95% identity) with the polynucleotide of the present invention to which it hybridizes, where sequence identity is determined by comparing the sequences of the hybridizing polynucleotides when aligned so as to maximize overlap and identity while minimizing sequence gaps.

[0055] The isolated polynucleotide of the invention may contain sequences at its 5′ and/or 3′ end that are derived from linker, polylinker, or multiple cloning site sequences commonly found in vectors such as the pMT2 or pED expression vectors (see below). For example, sequences such as SEQ ID NO:593, SEQ ID NO:594, or SEQ ID NO:595 may be found at the 5′ end of an isolated polynucleotide of the invention, or the complement of any of these sequences may be found at its 3′ end. Similarly, sequences such as SEQ ID NO:596, SEQ ID NO:597, or SEQ ID NO:598 may be found at the 3′ end of an isolated polynucleotide of the invention, or the complement of any of these sequences may be found at its 5′ end. In addition, variants of these linker sequences may be present in isolated polynucleotides of the invention, which linker variants vary from SEQ ID NO:593 through SEQ ID NO:598 by the alteration, insertion, or deletion of one or more nucleotides. Therefore, a preferred embodiment of the invention comprises the nucleotide sequence of any of the isolated polynucleotides disclosed herein, beginning at nucleotide 25 and ending at nucleotide (N-25) of the SEQ ID NO for that polynucleotide, where N represents the total number of nucleotides in the sequence. As a specific example, a preferred embodiment of the invention comprises the nucleotide sequence of SEQ ID NO:1 from nucleotide 25 to nucleotide 1775, where the total number of nucleotides (N) in SEQ ID NO:1 is 1800, and N-25 equals 1775. More preferably, a polynucleotide of the invention comprises the nucleotide sequence of any of the isolated polynucleotides disclosed herein, beginning at nucleotide 30 and ending at nucleotide (N-30) of the SEQ ID NO for that polynucleotide. Most preferably, a polynucleotide of the invention comprises the nucleotide sequence of any of the isolated polynucleotides disclosed herein, beginning at nucleotide 35 and ending at nucleotide (N-35) of the SEQ ID NO for that polynucleotide. Similarly, additional embodiments are those nucleotide sequences that extend from nucleotide 40 to nucleotide (N-40), or from nucleotide 45 to nucleotide (N-45), or from nucleotide 50 to nucleotide (N-50), or from nucleotide 60 to nucleotide (N-60), or from nucleotide 65 to nucleotide (N-65), or from nucleotide 70 to nucleotide (N-70), or from nucleotide 75 to nucleotide (N-75), or from nucleotide 80 to nucleotide (N-80), etc., for any of the polynucleotides disclosed herein. Further preferred embodiments are those nucleotide sequences that are subsequences of the nucleotide sequences disclosed herein, beginning at any nucleotide position selected from the group consisting of nucleotide 5, nucleotide 10, nucleotide 15, nucleotide 20, nucleotide 25, nucleotide 30, nucleotide 35, nucleotide 40, nucleotide 45, nucleotide 50, nucleotide 55, nucleotide 60, nucleotide 65, nucleotide 70, nucleotide 75, or nucleotide 80, and ending at any nucleotide position selected from the group consisting of nucleotide (N-5), nucleotide (N-10), nucleotide (N-15), nucleotide (N-20), nucleotide (N-25), nucleotide (N-30), nucleotide (N-35), nucleotide (N-40), nucleotide (N45), nucleotide (N-50), nucleotide (N-55), nucleotide (N-60), nucleotide (N-65), nucleotide (N-70), nucleotide (N-75), or nucleotide (N-80), wherein N is the total number of nucleotides disclosed for a particular SEQ ID NO.

[0056] The isolated polynucleotide of the invention may be operably linked to an expression control sequence such as the pMT2 or pED expression vectors disclosed in Kaufman et al., Nucleic Acids Res. 19, 4485-4490 (1991), in order to produce the protein recombinantly. Many suitable expression control sequences are known in the art. General methods of expressing recombinant proteins are also known and are exemplified in R. Kaufman, Methods in Enzymology 185, 537-566 (1990). As defined herein “operably linked” means that the isolated polynucleotide of the invention and an expression control sequence are situated within a vector or cell in such a way that the protein is expressed by a host cell which has been transformed (transfected) with the ligated polynucleotide/ expression control sequence.

[0057] A number of types of cells may act as suitable host cells for expression of the protein. Mammalian host cells include, for example, monkey COS cells, Chinese Hamster Ovary (CHO) cells, human kidney 293 cells, human epidermal A431 cells, human Color205 cells, 3T3 cells, CV-1 cells, other transformed primate cell lines, normal diploid cells, cell strains derived from in vitro culture of primary tissue, primary explants, HeLa cells, mouse L cells, BHK, HL-60, U937, HaK or Jurkat cells.

[0058] Alternatively, it may be possible to produce the protein in lower eukaryotes such as yeast or in prokaryotes such as bacteria. Potentially suitable yeast strains include Saccharomyces cerevisiae, Schizosaccharomyces pombe, Kluyveromyces strains, Candida, or any yeast strain capable of expressing heterologous proteins. Potentially suitable bacterial strains include Escherichia coli, Bacillus subtilis, Salmonella typhimurium, or any bacterial strain capable of expressing heterologous proteins. If the protein is made in yeast or bacteria, it may be necessary to modify the protein produced therein, for example by phosphorylation or glycosylation of the appropriate sites, in order to obtain the functional protein. Such covalent attachments may be accomplished using known chemical or enzymatic methods.

[0059] The protein may also be produced by operably linking the isolated polynucleotide of the invention to suitable control sequences in one or more insect expression vectors, and employing an insect expression system. Materials and methods for baculovirus/insect cell expression systems are commercially available in kit form from, e.g., Invitrogen, San Diego, Calif., U.S.A. (the MaxBac® kit), and such methods are well known in the art, as described in Summers and Smith, Texas Agricultural Experiment Station Bulletin No. 1555 (1987), incorporated herein by reference. As used herein, an insect cell capable of expressing a polynucleotide of the present invention is “transformed.”

[0060] The protein of the invention may be prepared by culturing transformed host cells under culture conditions suitable to express the recombinant protein. The resulting expressed protein may then be purified from such culture (i.e., from culture medium or cell extracts) using known purification processes, such as gel filtration and ion exchange chromatography. The purification of the protein may also include an affinity column containing agents which will bind to the protein; one or more column steps over such affinity resins as concanavalin A-agarose, heparin-toyopearl® or Cibacrom blue 3GA Sepharose®; one or more steps involving hydrophobic interaction chromatography using such resins as phenyl ether, butyl ether, or propyl ether; or immunoaffinity chromatography.

[0061] Alternatively, the protein of the invention may also be expressed in a form which will facilitate purification. For example, it may be expressed as a fusion protein, such as those of maltose binding protein (MBP), glutathione-S-transferase (GST) or thioredoxin (TRX). Kits for expression and purification of such fusion proteins are commercially available from New England BioLabs (Beverly, Mass.), Pharmacia (Piscataway, N.J.) and Invitrogen Corporation (Carlsbad, Calif.), respectively. The protein can also be tagged with an epitope and subsequently purified by using a specific antibody directed to such epitope. One such epitope (“Flag”) is commercially available from the Eastman Kodak Company (New Haven, Conn.).

[0062] Finally, one or more reverse-phase high performance liquid chromatography (RP-HPLC) steps employing hydrophobic RP-HPLC media, e.g., silica gel having pendant methyl or other aliphatic groups, can be employed to further purify the protein. Some or all of the foregoing purification steps, in various combinations, can also be employed to provide a substantially homogeneous isolated recombinant protein. The protein thus purified is substantially free of other mammalian proteins and is defined in accordance with the present invention as an “isolated protein.”The protein of the invention may also be expressed as a product of transgenic animals, e.g., as a component of the milk of transgenic cows, goats, pigs, or sheep which are characterized by somatic or germ cells containing a nucleotide sequence encoding the protein.

[0063] The protein may also be produced by known conventional chemical synthesis. Methods for constructing the proteins of the present invention by synthetic means are known to those skilled in the art. The synthetically-constructed protein sequences, by virtue of sharing primary, secondary or tertiary structural and/or conformational characteristics with proteins may possess biological properties in common therewith, including protein activity. Thus, they may be employed as biologically active or immunological substitutes for natural, purified proteins in screening of therapeutic compounds and in immunological processes for the development of antibodies.

[0064] The proteins provided herein also include proteins characterized by amino acid sequences similar to those of purified proteins but into which modification are naturally provided or deliberately engineered. For example, modifications in the peptide or DNA sequences can be made by those skilled in the art using known techniques. Modifications of interest in the protein sequences may include the alteration, substitution, replacement, insertion or deletion of a selected amino acid residue in the coding sequence. For example, one or more of the cysteine residues may be deleted or replaced with another amino acid to alter the conformation of the molecule. Techniques for such alteration, substitution, replacement, insertion or deletion are well known to those skilled in the art (see, e.g., U.S. Patent No. 4,518,584). Preferably, such alteration, substitution, replacement, insertion or deletion retains the desired activity of the protein.

[0065] Other fragments and derivatives of the sequences of proteins which would be expected to retain protein activity in whole or in part and may thus be useful for screening or other immunological methodologies may also be easily made by those skilled in the art given the disclosures herein. Such modifications are believed to be encompassed by the present invention.

[0066] Uses and Biological Activity

[0067] The polynucleotides and proteins of the present invention are expected to exhibit one or more of the uses or biological activities (including those associated with assays cited herein) identified below. Uses or activities described for proteins of the present invention may be provided by administration or use of such proteins or by administration or use of polynucleotides encoding such proteins (such as, for example, in gene therapies or vectors suitable for introduction of DNA).

[0068] Research Uses and Utilities

[0069] The polynucleotides provided by the present invention can be used by the research community for various purposes. The primary use of polynucleotides of the invention which are sESTs is as porbes for the identification and isolation of full-length cDNAs and genomic DNA molecules which correspond (i.e., is a longer polynucleotide sequence of which substantially the entire sEST is a fragment in the case of a full-length cDNA, or which encodes the sEST in the case of a genomic DNA molecule) to such sESTs. Techniques for use of such sequences as probes for larger cDNAs or genomic molecules are well known in the art.

[0070] The polynucleotides can also be used to express recombinant protein for analysis, characterization or therapeutic use; as markers for tissues in which the corresponding protein is preferentially expressed (either constitutively or at a particular stage of tissue differentiation or development or in disease states); as molecular weight markers on Southern gels; as chromosome markers or tags (when labeled) to identify chromosomes or to map related gene positions; to compare with endogenous DNA sequences in patients to identify potential genetic disorders; as probes to hybridize and thus discover novel, related DNA sequences; as a source of information to derive PCR primers for genetic fingerprinting; as a probe to “subtract-out” known sequences in the process of discovering other novel polynucleotides; for selecting and making oligomers for attachment to a “gene chip” or other support, including for examination of expression patterns; to raise anti-protein antibodies using DNA immunization techniques; and as an antigen to raise anti-DNA antibodies or elicit another immune response. Where the polynucleotide encodes a protein which binds or potentially binds to another protein (such as, for example, in a receptor-ligand interaction), the polynucleotide can also be used in interaction trap assays (such as, for example, that described in Gyuris et al., Cell 75:791-803 (1993)) to identify polynucleotides encoding the other protein with which binding occurs or to identify inhibitors of the binding interaction.

[0071] The proteins provided by the present invention can similarly be used in assay to determine biological activity, including in a panel of multiple proteins for high-throughput screening; to raise antibodies or to elicit another immune response; as a reagent (including the labeled reagent) in assays designed to quantitatively determine levels of the protein (or its receptor) in biological fluids; as markers for tissues in which the corresponding protein is preferentially expressed (either constitutively or at a particular stage of tissue differentiation or development or in a disease state); and, of course, to isolate correlative receptors or ligands. Where the protein binds or potentially binds to another protein (such as, for example, in a receptor-ligand interaction), the protein can be used to identify the other protein with which binding occurs or to identify inhibitors of the binding interaction. Proteins involved in these binding interactions can also be used to screen for peptide or small molecule inhibitors or agonists of the binding interaction.

[0072] Any or all of these research utilities are capable of being developed into reagent grade or kit format for commercialization as research products.

[0073] Methods for performing the uses listed above are well known to those skilled in the art. References disclosing such methods include without limitation “Molecular Cloning: A Laboratory Manual”, 2d ed., Cold Spring Harbor Laboratory Press, Sambrook, J., E. F. Fritsch and T. Maniatis eds., 1989, and “Methods in Enzymology: Guide to Molecular Cloning Techniques”, Academic Press, Berger, S. L. and A. R. Kimmel eds., 1987.

[0074] Nutritional Uses

[0075] Polynucleotides and proteins of the present invention can also be used as nutritional sources or supplements. Such uses include without limitation use as a protein or amino acid supplement, use as a carbon source, use as a nitrogen source and use as a source of carbohydrate. In such cases the protein or polynucleotide of the invention can be added to the feed of a particular organism or can be administered as a separate solid or liquid preparation, such as in the form of powder, pills, solutions, suspensions or capsules. In the case of microorganisms, the protein or polynucleotide of the invention can be added to the medium in or on which the microorganism is cultured.

[0076] Cytokine and Cell Proliferation/ Differentiation Activity

[0077] A protein of the present invention may exhibit cytokine, cell proliferation (either inducing or inhibiting) or cell differentiation (either inducing or inhibiting) activity or may induce production of other cytokines in certain cell populations. Many protein factors discovered to date, including all known cytokines, have exhibited activity in one or more factor dependent cell proliferation assays, and hence the assays serve as a convenient confirmation of cytokine activity. The activity of a protein of the present invention is evidenced by any one of a number of routine factor dependent cell proliferation assays for cell lines including, without limitation, 32D, DA2, DA1G, T10, B9, B9/11, BaF3, MC9/G, M+ (preB M+), 2E8, RB5, DA1, 123, T1165, HT2, CTLL2, TF-1, Mo7e and CMK.

[0078] The activity of a protein of the invention may, among other means, be measured by the following methods:

[0079] Assays for T-cell or thymocyte proliferation include without limitation those described in: Current Protocols in Immunology, Ed by J. E. Coligan, A. M. Kruisbeek, D. H. Margulies, E. M. Shevach, W Strober, Pub. Greene Publishing Associates and Wiley-Interscience (Chapter 3, In Vitro assays for Mouse Lymphocyte Function 3.1-3.19; Chapter 7, Immunologic studies in Humans); Takai et al., J. Immunol. 137:3494-3500, 1986; Bertagnolli et al., J. Immunol. 145:1706-1712, 1990; Bertagnolli et al., Cellular Immunology 133:327-341, 1991; Bertagnolli, et al., J. Immunol. 149:3778-3783, 1992; Bowman et al., J. Immunol. 152: 1756-1761, 1994.

[0080] Assays for cytokine production and/or proliferation of spleen cells, lymph node cells or thymocytes include, without limitation, those described in: Polyclonal T cell stimulation, Kruisbeek, A. M. and Shevach, E. M. In Current Protocols in Immunology. J. E. e.a. Coligan eds. Vol 1 pp. 3.12.1-3.12.14, John Wiley and Sons, Toronto. 1994; and Measurement of mouse and human Interferon γ, Schreiber, R. D. In Current Protocols in Immunology. J. E. e.a. Coligan eds. Vol 1 pp. 6.8.1-6.8.8, John Wiley and Sons, Toronto. 1994.

[0081] Assays for proliferation and differentiation of hematopoietic and lymphopoietic cells include, without limitation, those described in: Measurement of Human and Murine Interleukin 2 and Interleukin 4, Bottomly, K., Davis, L. S. and Lipsky, P. E. In Current Protocols in Immunology. J. E.e.a. Coligan eds. Vol 1 pp. 6.3.1-6.3.12, John Wiley and Sons, Toronto. 1991; deVries et al., J. Exp. Med. 173:1205-1211, 1991; Moreau et al., Nature 336:690-692, 1988; Greenberger et al., Proc. Natl. Acad. Sci. U.S.A. 80:2931-2938, 1983; Measurement of mouse and human interleukin 6—Nordan, R. In Current Protocols in Immunology. J. E. e.a. Coligan eds. Vol 1 pp. 6.6.1-6.6.5, John Wiley and Sons, Toronto. 1991; Smith et al., Proc. Natl. Acad. Sci. U.S.A. 83:1857-1861, 1986; Measurement of human Interleukin 11—Bennett, F., Giannotti, J., Clark, S. C. and Turner, K. J. In Current Protocols in Immunology. J. E. e.a. Coligan eds. Vol 1 pp. 6.15.1 John Wiley and Sons, Toronto. 1991; Measurement of mouse and human Interleukin 9—Ciarletta, A., Giannotti, J., Clark, S. C. and Turner, K. J. In Current Protocols in Immunology. J. E. e.a. Coligan eds. Vol 1 pp. 6.13.1, John Wiley and Sons, Toronto. 1991.

[0082] Assays for T-cell clone responses to antigens (which will identify, among others, proteins that affect APC-T cell interactions as well as direct T-cell effects by measuring proliferation and cytokine production) include, without limitation, those described in: Current Protocols in Immunology, Ed by J. E. Coligan, A. M. Kruisbeek, D. H. Margulies, E. M. Shevach, W Strober, Pub. Greene Publishing Associates and Wiley-Interscience (Chapter 3, In Vitro assays for Mouse Lymphocyte Function; Chapter 6, Cytokines and their cellular receptors; Chapter 7, Immunologic studies in Humans); Weinberger et al., Proc. Natl. Acad. Sci. USA 77:6091-6095, 1980; Weinberger et al., Eur. J. Immun. 11:405-411, 1981; Takai et al., J. Immunol. 137:3494-3500, 1986; Takai et al., J. Immunol. 140:508-512, 1988.

[0083] Immune Stimulating or Suppressing Activity

[0084] A protein of the present invention may also exhibit immune stimulating or immune suppressing activity, including without limitation the activities for which assays are described herein. A protein may be useful in the treatment of various immune deficiencies and disorders (including severe combined immunodeficiency (SCID)), e.g., in regulating (up or down) growth and proliferation of T and/or B lymphocytes, as well as effecting the cytolytic activity of NK cells and other cell populations. These immune deficiencies may be genetic or be caused by viral (e.g., HIV) as well as bacterial or fungal infections, or may result from autoimmune disorders. More specifically, infectious diseases causes by viral, bacterial, fungal or other infection may be treatable using a protein of the present invention, including infections by HIV, hepatitis viruses, herpesviruses, mycobacteria, Leishmania spp., malaria spp. and various fungal infections such as candidiasis. Of course, in this regard, a protein of the present invention may also be useful where a boost to the immune system generally may be desirable, i.e., in the treatment of cancer.

[0085] Autoimmune disorders which may be treated using a protein of the present invention include, for example, connective tissue disease, multiple sclerosis, systemic lupus erythematosus, rheumatoid arthritis, autoimmune pulmonary inflammation, Guillain-Barre syndrome, autoimmune thyroiditis, insulin dependent diabetes mellitis, myasthenia gravis, graft-versus-host disease and autoimmune inflammatory eye disease. Such a protein of the present invention may also to be useful in the treatment of allergic reactions and conditions, such as asthma (particularly allergic asthma) or other respiratory problems. Other conditions, in which immune suppression is desired (including, for example, organ transplantation), may also be treatable using a protein of the present invention.

[0086] Using the proteins of the invention it may also be possible to immune responses, in a number of ways. Down regulation may be in the form of inhibiting or blocking an immune response already in progress or may involve preventing the induction of an immune response. The functions of activated T cells may be inhibited by suppressing T cell responses or by inducing specific tolerance in T cells, or both. Immunosuppression of T cell responses is generally an active, non-antigen-specific, process which requires continuous exposure of the T cells to the suppressive agent. Tolerance, which involves inducing non-responsiveness or anergy in T cells, is distinguishable from immunosuppression in that it is generally antigen-specific and persists after exposure to the tolerizing agent has ceased. Operationally, tolerance can be demonstrated by the lack of a T cell response upon reexposure to specific antigen in the absence of the tolerizing agent.

[0087] Down regulating or preventing one or more antigen functions (including without limitation B lymphocyte antigen functions (such as, for example, B7)), e.g., preventing high level lymphokine synthesis by activated T cells, will be useful in situations of tissue, skin and organ transplantation and in graft-versus-host disease (GVHD). For example, blockage of T cell function should result in reduced tissue destruction in tissue transplantation. Typically, in tissue transplants, rejection of the transplant is initiated through its recognition as foreign by T cells, followed by an immune reaction that destroys the transplant. The administration of a molecule which inhibits or blocks interaction of a B7 lymphocyte antigen with its natural ligand(s) on immune cells (such as a soluble, monomeric form of a peptide having B7-2 activity alone or in conjunction with a monomeric form of a peptide having an activity of another B lymphocyte antigen (e.g., B7-1, B7-3) or blocking antibody), prior to transplantation can lead to the binding of the molecule to the natural ligand(s) on the immune cells without transmitting the corresponding costimulatory signal. Blocking B lymphocyte antigen function in this matter prevents cytokine synthesis by immune cells, such as T cells, and thus acts as an immunosuppressant. Moreover, the lack of costimulation may also be sufficient to anergize the T cells, thereby inducing tolerance in a subject. Induction of long-term tolerance by B lymphocyte antigen-blocking reagents may avoid the necessity of repeated administration of these blocking reagents. To achieve sufficient immunosuppression or tolerance in a subject, it may also be necessary to block the function of a combination of B lymphocyte antigens.

[0088] The efficacy of particular blocking reagents in preventing organ transplant rejection or GVHD can be assessed using animal models that are predictive of efficacy in humans. Examples of appropriate systems which can be used include allogeneic cardiac grafts in rats and xenogeneic pancreatic islet cell grafts in mice, both of which have been used to examine the immunosuppressive effects of CTLA4Ig fusion proteins in vivo as described in Lenschow et al., Science 257:789-792 (1992) and Turka et al., Proc. Natl. Acad. Sci USA, 89:11102-11105 (1992). In addition, murine models of GVHD (see Paul ed., Fundamental Immunology, Raven Press, New York, 1989, pp. 846-847) can be used to determine the effect of blocking B lymphocyte antigen function in vivo on the development of that disease.

[0089] Blocking antigen function may also be therapeutically useful for treating autoimmune diseases. Many autoimmune disorders are the result of inappropriate activation of T cells that are reactive against self tissue and which promote the production of cytokines and autoantibodies involved in the pathology of the diseases. Preventing the activation of autoreactive T cells may reduce or eliminate disease symptoms. Administration of reagents which block costimulation of T cells by disrupting receptor:ligand interactions of B lymphocyte antigens can be used to inhibit T cell activation and prevent production of autoantibodies or T cell-derived cytokines which may be involved in the disease process. Additionally, blocking reagents may induce antigen-specific tolerance of autoreactive T cells which could lead to long-term relief from the disease. The efficacy of blocking reagents in preventing or alleviating autoimmune disorders can be determined using a number of well-characterized animal models of human autoimmune diseases. Examples include murine experimental autoimmune encephalitis, systemic lupus erythmatosis in MRL/lpr/lpr mice or NZB hybrid mice, murine autoimmune collagen arthritis, diabetes mellitus in NOD mice and BB rats, and murine experimental myasthenia gravis (see Paul ed., Fundamental Immunology, Raven Press, New York, 1989, pp. 840-856).

[0090] Upregulation of an antigen function (preferably a B lymphocyte antigen function), as a means of up regulating immune responses, may also be useful in therapy. Upregulation of immune responses may be in the form of enhancing an existing immune response or eliciting an initial immune response. For example, enhancing an immune response through stimulating B lymphocyte antigen function may be useful in cases of viral infection. In addition, systemic viral diseases such as influenza, the common cold, and encephalitis might be alleviated by the administration of stimulatory forms of B lymphocyte antigens systemically.

[0091] Alternatively, anti-viral immune responses may be enhanced in an infected patient by removing T cells from the patient, costimulating the T cells in vitro with viral antigen-pulsed APCs either expressing a peptide of the present invention or together with a stimulatory form of a soluble peptide of the present invention and reintroducing the in vitro activated T cells into the patient. Another method of enhancing anti-viral immune responses would be to isolate infected cells from a patient, transfect them with a nucleic acid encoding a protein of the present invention as described herein such that the cells express all or a portion of the protein on their surface, and reintroduce the transfected cells into the patient. The infected cells would now be capable of delivering a costimulatory signal to, and thereby activate, T cells in vivo.

[0092] In another application, up regulation or enhancement of antigen function (preferably B lymphocyte antigen function) may be useful in the induction of tumor immunity. Tumor cells (e.g., sarcoma, melanoma, lymphoma, leukemia, neuroblastoma, carcinoma) transfected with a nucleic acid encoding at least one peptide of the present invention can be administered to a subject to overcome tumor-specific tolerance in the subject. If desired, the tumor cell can be transfected to express a combination of peptides. For example, tumor cells obtained from a patient can be transfected ex vivo with an expression vector directing the expression of a peptide having B7-2-like activity alone, or in conjunction with a peptide having B7-1-like activity and/or B7-3-like activity. The transfected tumor cells are returned to the patient to result in expression of the peptides on the surface of the transfected cell. Alternatively, gene therapy techniques can be used to target a tumor cell for transfection in vivo.

[0093] The presence of the peptide of the present invention having the activity of a B lymphocyte antigen(s) on the surface of the tumor cell provides the necessary costimulation signal to T cells to induce a T cell mediated immune response against the transfected tumor cells. In addition, tumor cells which lack MHC class I or MHC class II molecules, or which fail to reexpress sufficient amounts of MHC class I or MHC class II molecules, can be transfected with nucleic acid encoding all or a portion of (e.g., a cytoplasmic-domain truncated portion) of an MHC class I α chain protein and β₂ microglobulin protein or an MHC class II α chain protein and an MHC class II β chain protein to thereby express MHC class I or MHC class II proteins on the cell surface. Expression of the appropriate class I or class II MHC in conjunction with a peptide having the activity of a B lymphocyte antigen (e.g., B7-1, B7-2, B7-3) induces a T cell mediated immune response against the transfected tumor cell. Optionally, a gene encoding an antisense construct which blocks expression of an MHC class II associated protein, such as the invariant chain, can also be cotransfected with a DNA encoding a peptide having the activity of a B lymphocyte antigen to promote presentation of tumor associated antigens and induce tumor specific immunity. Thus, the induction of a T cell mediated immune response in a human subject may be sufficient to overcome tumor-specific tolerance in the subject.

[0094] The activity of a protein of the invention may, among other means, be measured by the following methods:

[0095] Suitable assays for thymocyte or splenocyte cytotoxicity include, without limitation, those described in: Current Protocols in Immunology, Ed by J. E. Coligan, A. M. Kruisbeek, D. H. Margulies, E. M. Shevach, W Strober, Pub. Greene Publishing Associates and Wiley-Interscience (Chapter 3, In Vitro assays for Mouse Lymphocyte Function 3.1-3.19; Chapter 7, Immunologic studies in Humans); Herrmann et al., Proc. Natl. Acad. Sci. USA 78:2488-2492, 1981; Herrmann et al., J. Immunol. 128:1968-1974, 1982; Handa et al., J. Immunol. 135:1564-1572, 1985; Takai et al., J. Immunol. 137:3494-3500, 1986; Takai et al., J. Immunol. 140:508-512, 1988; Herrmann et al., Proc. Natl. Acad. Sci. USA 78:2488-2492, 1981; Herrmann et al., J. Immunol. 128:1968-1974, 1982; Handa et al., J. Immunol. 135:1564-1572, 1985; Takai et al., J. Immunol. 137:3494-3500, 1986; Bowmanet al., J. Virology 61:1992-1998; Takai et al., J. Immunol. 140:508-512, 1988; Bertagnolli et al., Cellular Immunology 133:327-341, 1991; Brown et al., J. Immunol. 153:3079-3092, 1994.

[0096] Assays for T-cell-dependent immunoglobulin responses and isotype switching (which will identify, among others, proteins that modulate T-cell dependent antibody responses and that affect Th1/Th2 profiles) include, without limitation, those described in: Maliszewski, J. Immunol. 144:3028-3033, 1990; and Assays for B cell function: In vitro antibody production, Mond, J. J. and Brunswick, M. In Current Protocols in Immunology. J. E. e.a. Coligan eds. Vol 1 pp. 3.8.1-3.8.16, John Wiley and Sons, Toronto. 1994.

[0097] Mixed lymphocyte reaction (MLR) assays (which will identify, among others, proteins that generate predominantly Th1 and CTL responses) include, without limitation, those described in: Current Protocols in Immunology, Ed by J. E. Coligan, A. M. Kruisbeek, D. H. Margulies, E. M. Shevach, W Strober, Pub. Greene Publishing Associates and Wiley-Interscience (Chapter 3, In Vitro assays for Mouse Lymphocyte Function 3.1-3.19; Chapter 7, Immunologic studies in Humans); Takai et al., J. Immunol. 137:3494-3500, 1986; Takai et al., J. Immunol. 140:508-512, 1988; Bertagnolli et al., J. Immunol. 149:3778-3783, 1992.

[0098] Dendritic cell-dependent assays (which will identify, among others, proteins expressed by dendritic cells that activate naive T-cells) include, without limitation, those described in: Guery et al., J. Immunol. 134:536-544, 1995; Inaba et al., Journal of Experimental Medicine 173:549-559, 1991; Macatonia et al., Journal of Immunology 154:5071-5079, 1995; Porgador et al., Journal of Experimental Medicine 182:255-260, 1995; Nair et al., Journal of Virology 67:4062-4069, 1993; Huang et al., Science 264:961-965, 1994; Macatonia et al., Journal of Experimental Medicine 169:1255-1264, 1989; Bhardwaj et al., Journal of Clinical Investigation 94:797-807, 1994; and Inaba et al., Journal of Experimental Medicine 172:631-640, 1990.

[0099] Assays for lymphocyte survival/apoptosis (which will identify, among others, proteins that prevent apoptosis after superantigen induction and proteins that regulate lymphocyte homeostasis) include, without limitation, those described in: Darzynkiewicz et al., Cytometry 13:795-808, 1992; Gorczyca et al., Leukemia 7:659-670, 1993; Gorczyca et al., Cancer Research 53:1945-1951, 1993; Itoh et al., Cell 66:233-243, 1991; Zacharchuk, Journal of Immunology 145:4037-4045, 1990; Zamai et al., Cytometry 14:891-897, 1993; Gorczyca et al., International Journal of Oncology 1:639-648, 1992.

[0100] Assays for proteins that influence early steps of T-cell commitment and development include, without limitation, those described in: Antica et al., Blood 84:111-117, 1994; Fine et al., Cellular Immunology 155:111-122, 1994; Galy et al., Blood 85:2770-2778, 1995; Toki et al., Proc. Nat. Acad Sci. USA 88:7548-7551, 1991.

[0101] Hematopoiesis Regulating Activity

[0102] A protein of the present invention may be useful in regulation of hematopoiesis and, consequently, in the treatment of myeloid or lymphoid cell deficiencies. Even marginal biological activity in support of colony forming cells or of factor-dependent cell lines indicates involvement in regulating hematopoiesis, e.g. in supporting the growth and proliferation of erythroid progenitor cells alone or in combination with other cytokines, thereby indicating utility, for example, in treating various anemias or for use in conjunction with irradiation/chemotherapy to stimulate the production of erythroid precursors and/or erythroid cells; in supporting the growth and proliferation of myeloid cells such as granulocytes and monocytes/macrophages (i.e., traditional CSF activity) useful, for example, in conjunction with chemotherapy to prevent or treat consequent myelo-suppression; in supporting the growth and proliferation of megakaryocytes and consequently of platelets thereby allowing prevention or treatment of various platelet disorders such as thrombocytopenia, and generally for use in place of or complimentary to platelet transfusions; and/or in supporting the growth and proliferation of hematopoietic stem cells which are capable of maturing to any and all of the above-mentioned hematopoietic cells and therefore find therapeutic utility in various stem cell disorders (such as those usually treated with transplantation, including, without limitation, aplastic anemia and paroxysmal nocturnal hemoglobinuria), as well as in repopulating the stem cell compartment post irradiation/chemotherapy, either in-vivo or ex-vivo (i.e., in conjunction with bone marrow transplantation or with peripheral progenitor cell transplantation (homologous or heterologous)) as normal cells or genetically manipulated for gene therapy.

[0103] The activity of a protein of the invention may, among other means, be measured by the following methods:

[0104] Suitable assays for proliferation and differentiation of various hematopoietic lines are cited above.

[0105] Assays for embryonic stem cell differentiation (which will identify, among others, proteins that influence embryonic differentiation hematopoiesis) include, without limitation, those described in: Johansson et al. Cellular Biology 15:141-151, 1995; Keller et al., Molecular and Cellular Biology 13:473-486, 1993; McClanahan et al., Blood 81:2903-2915, 1993.

[0106] Assays for stem cell survival and differentiation (which will identify, among others, proteins that regulate lympho-hematopoiesis) include, without limitation, those described in: Methylcellulose colony forming assays, Freshney, M. G. In Culture of Hematopoietic Cells. R. I. Freshney, et al. eds. Vol pp. 265-268, Wiley-Liss, Inc., New York, N.Y. 1994; Hirayama et al., Proc. Natl. Acad. Sci. USA 89:5907-5911, 1992; Primitive hematopoietic colony forming cells with high proliferative potential, McNiece, I. K. and Briddell, R. A. In Culture of Hematopoietic Cells. R. I. Freshney, et al. eds. Vol pp. 23-39, Wiley-Liss, Inc., New York, N.Y. 1994; Neben et al., Experimental Hematology 22:353-359, 1994; Cobblestone area forming cell assay, Ploemacher, R. E. In Culture of Hematopoietic Cells. R. I. Freshney, et al. eds. Vol pp. 1-21, Wiley-Liss, Inc., New York, N.Y. 1994; Long term bone marrow cultures in the presence of stromal cells, Spooncer, E., Dexter, M. and Allen, T. In Culture of Hematopoietic Cells. R. I. Freshney, et al. eds. Vol pp. 163-179, Wiley-Liss, Inc., New York, N.Y. 1994; Long term culture initiating cell assay, Sutherland, H. J. In Culture of Hematopoietic Cells. R. I. Freshney, et al. eds. Vol pp. 139-162, Wiley-Liss, Inc., New York, N.Y. 1994.

[0107] Tissue Growth Activity

[0108] A protein of the present invention also may have utility in compositions used for bone, cartilage, tendon, ligament and/or nerve tissue growth or regeneration, as well as for wound healing and tissue repair and replacement, and in the treatment of burns, incisions and ulcers.

[0109] A protein of the present invention, which induces cartilage and/or bone growth in circumstances where bone is not normally formed, has application in the healing of bone fractures and cartilage damage or defects in humans and other animals. Such a preparation employing a protein of the invention may have prophylactic use in closed as well as open fracture reduction and also in the improved fixation of artificial joints. De novo bone formation induced by an osteogenic agent contributes to the repair of congenital, trauma induced, or oncologic resection induced craniofacial defects, and also is useful in cosmetic plastic surgery.

[0110] A protein of this invention may also be used in the treatment of periodontal disease, and in other tooth repair processes. Such agents may provide an environment to attract bone-forming cells, stimulate growth of bone-forming cells or induce differentiation of progenitors of bone-forming cells. A protein of the invention may also be useful in the treatment of osteoporosis or osteoarthritis, such as through stimulation of bone and/or cartilage repair or by blocking inflammation or processes of tissue destruction (collagenase activity, osteoclast activity, etc.) mediated by inflammatory processes.

[0111] Another category of tissue regeneration activity that may be attributable to the protein of the present invention is tendon/ligament formation. A protein of the present invention, which induces tendon/ligament-like tissue or other tissue formation in circumstances where such tissue is not normally formed, has application in the healing of tendon or ligament tears, deformities and other tendon or ligament defects in humans and other animals. Such a preparation employing a tendon/ligament-like tissue inducing protein may have prophylactic use in preventing damage to tendon or ligament tissue, as well as use in the improved fixation of tendon or ligament to bone or other tissues, and in repairing defects to tendon or ligament tissue. De novo tendon/ligament-like tissue formation induced by a composition of the present invention contributes to the repair of congenital, trauma induced, or other tendon or ligament defects of other origin, and is also useful in cosmetic plastic surgery for attachment or repair of tendons or ligaments. The compositions of the present invention may provide an environment to attract tendon-or ligament-forming cells, stimulate growth of tendon-or ligament-forming cells, induce differentiation of progenitors of tendon-or ligament-forming cells, or induce growth of tendon/ligament cells or progenitors ex vivo for return in vivo to effect tissue repair. The compositions of the invention may also be useful in the treatment of tendinitis, carpal tunnel syndrome and other tendon or ligament defects. The compositions may also include an appropriate matrix and/or sequestering agent as a carrier as is well known in the art.

[0112] The protein of the present invention may also be useful for proliferation of neural cells and for regeneration of nerve and brain tissue, i.e. for the treatment of central and peripheral nervous system diseases and neuropathies, as well as mechanical and traumatic disorders, which involve degeneration, death or trauma to neural cells or nerve tissue. More specifically, a protein may be used in the treatment of diseases of the peripheral nervous system, such as peripheral nerve injuries, peripheral neuropathy and localized neuropathies, and central nervous system diseases, such as Alzheimer's, Parkinson's disease, Huntington's disease, amyotrophic lateral sclerosis, and Shy-Drager syndrome. Further conditions which may be treated in accordance with the present invention include mechanical and traumatic disorders, such as spinal cord disorders, head trauma and cerebrovascular diseases such as stroke. Peripheral neuropathies resulting from chemotherapy or other medical therapies may also be treatable using a protein of the invention.

[0113] Proteins of the invention may also be useful to promote better or faster closure of non-healing wounds, including without limitation pressure ulcers, ulcers associated with vascular insufficiency, surgical and traumatic wounds, and the like.

[0114] It is expected that a protein of the present invention may also exhibit activity for generation or regeneration of other tissues, such as organs (including, for example, pancreas, liver, intestine, kidney, skin, endothelium), muscle (smooth, skeletal or cardiac) and vascular (including vascular endothelium) tissue, or for promoting the growth of cells comprising such tissues. Part of the desired effects may be by inhibition or modulation of fibrotic scarring to allow normal tissue to regenerate. A protein of the invention may also exhibit angiogenic activity.

[0115] A protein of the present invention may also be useful for gut protection or regeneration and treatment of lung or liver fibrosis, reperfusion injury in various tissues, and conditions resulting from systemic cytokine damage.

[0116] A protein of the present invention may also be useful for promoting or inhibiting differentiation of tissues described above from precursor tissues or cells; or for inhibiting the growth of tissues described above.

[0117] The activity of a protein of the invention may, among other means, be measured by the following methods:

[0118] Assays for tissue generation activity include, without limitation, those described in: International Patent Publication No. WO95/16035 (bone, cartilage, tendon); International Patent Publication No. WO95/05846 (nerve, neuronal); International Patent Publication No. WO91/07491 (skin, endothelium).

[0119] Assays for wound healing activity include, without limitation, those described in: Winter, Epidermal Wound Healing, pps. 71-112 (Maibach, H I and Rovee, D T, eds.), Year Book Medical Publishers, Inc., Chicago, as modified by Eaglstein and Mertz, J. Invest. Dermatol 71:382-84 (1978).

[0120] Activin/Inhibin Activity

[0121] A protein of the present invention may also exhibit activin-or inhibin-related activities. Inhibins are characterized by their ability to inhibit the release of follicle stimulating hormone (FSH), while activins and are characterized by their ability to stimulate the release of follicle stimulating hormone (FSH). Thus, a protein of the present invention, alone or in heterodimers with a member of the inhibin a family, may be useful as a contraceptive based on the ability of inhibins to decrease fertility in female mammals and decrease spermatogenesis in male mammals. Administration of sufficient amounts of other inhibins can induce infertility in these mammals. Alternatively, the protein of the invention, as a homodimer or as a heterodimer with other protein subunits of the inhibin-β group, may be useful as a fertility inducing therapeutic, based upon the ability of activin molecules in stimulating FSH release from cells of the anterior pituitary. See, for example, U.S. Pat. No.4,798,885. A protein of the invention may also be useful for advancement of the onset of fertility in sexually immature mammals, so as to increase the lifetime reproductive performance of domestic animals such as cows, sheep and pigs.

[0122] The activity of a protein of the invention may, among other means, be measured by the following methods:

[0123] Assays for activin/inhibin activity include, without limitation, those described in: Vale et al., Endocrinology 91:562-572, 1972; Ling et al., Nature 321:779-782, 1986; Vale et al., Nature 321:776-779, 1986; Mason et al., Nature 318:659-663, 1985; Forage et al., Proc. Natl. Acad. Sci. USA 83:3091-3095, 1986.

[0124] Chemotactic/Chemokinetic Activity

[0125] A protein of the present invention may have chemotactic or chemokinetic activity (e.g., act as a chemokine) for mammalian cells, including, for example, monocytes, fibroblasts, neutrophils, T-cells, mast cells, eosinophils, epithelial and/or endothelial cells. Chemotactic and chemokinetic proteins can be used to mobilize or attract a desired cell population to a desired site of action. Chemotactic or chemokinetic proteins provide particular advantages in treatment of wounds and other trauma to tissues, as well as in treatment of localized infections. For example, attraction of lymphocytes, monocytes or neutrophils to tumors or sites of infection may result in improved immune responses against the tumor or infecting agent.

[0126] A protein or peptide has chemotactic activity for a particular cell population if it can stimulate, directly or indirectly, the directed orientation or movement of such cell population. Preferably, the protein or peptide has the ability to directly stimulate directed movement of cells. Whether a particular protein has chemotactic activity for a population of cells can be readily determined by employing such protein or peptide in any known assay for cell chemotaxis.

[0127] The activity of a protein of the invention may, among other means, be measured by the following methods:

[0128] Assays for chemotactic activity (which will identify proteins that induce or prevent chemotaxis) consist of assays that measure the ability of a protein to induce the migration of cells across a membrane as well as the ability of a protein to induce the adhesion of one cell population to another cell population. Suitable assays for movement and adhesion include, without limitation, those described in: Current Protocols in Immunology, Ed by J. E. Coligan, A. M. Kruisbeek, D. H. Margulies, E. M. Shevach, W.Strober, Pub. Greene Publishing Associates and Wiley-Interscience (Chapter 6.12, Measurement of alpha and beta Chemokines 6.12.1-6.12.28; Taub et al. J. Clin. Invest. 95:1370-1376, 1995; Lind et al. APMIS 103:140-146, 1995; Muller et al Eur. J. Immunol. 25: 1744-1748; Gruber et al. J. of Immunol. 152:5860-5867, 1994; Johnston et al. J. of Immunol. 153: 1762-1768, 1994.

[0129] Hemostatic and Thrombolytic Activity

[0130] A protein of the invention may also exhibit hemostatic or thrombolytic activity. As a result, such a protein is expected to be useful in treatment of various coagulation disorders (including hereditary disorders, such as hemophilias) or to enhance coagulation and other hemostatic events in treating wounds resulting from trauma, surgery or other causes. A protein of the invention may also be useful for dissolving or inhibiting formation of thromboses and for treatment and prevention of conditions resulting therefrom (such as, for example, infarction of cardiac and central nervous system vessels (e.g., stroke).

[0131] The activity of a protein of the invention may, among other means, be measured by the following methods:

[0132] Assay for hemostatic and thrombolytic activity include, without limitation, those described in: Linet et al., J. Clin. Pharmacol. 26:131-140, 1986; Burdick et al., Thrombosis Res. 45:413-419, 1987; Humphrey et al., Fibrinolysis 5:71-79 (1991); Schaub, Prostaglandins 35:467-474, 1988.

[0133] Receptor/Ligand Activity

[0134] A protein of the present invention may also demonstrate activity as receptors, receptor ligands or inhibitors or agonists of receptor/ligand interactions. Examples of such receptors and ligands include, without limitation, cytokine receptors and their ligands, receptor kinases and their ligands, receptor phosphatases and their ligands, receptors involved in cell-cell interactions and their ligands (including without limitation, cellular adhesion molecules (such as selecting, integrins and their ligands) and receptor/ligand pairs involved in antigen presentation, antigen recognition and development of cellular and humoral immune responses). Receptors and ligands are also useful for screening of potential peptide or small molecule inhibitors of the relevant receptor/ligand interaction. A protein of the present invention (including, without limitation, fragments of receptors and ligands) may themselves be useful as inhibitors of receptor/ligand interactions.

[0135] The activity of a protein of the invention may, among other means, be measured by the following methods:

[0136] Suitable assays for receptor-ligand activity include without limitation those described in:Current Protocols in Immunology, Ed by J. E. Coligan, A. M. Kruisbeek, D. H. Margulies, E. M. Shevach, W.Strober, Pub. Greene Publishing Associates and Wiley-Interscience (Chapter 7.28, Measurement of Cellular Adhesion under static conditions 7.28.1-7.28.22), Takai et al., Proc. Natl. Acad. Sci. USA 84:6864-6868, 1987; Bierer et al., J. Exp. Med. 168:1145-1156, 1988; Rosenstein et al., J. Exp. Med. 169:149-160 1989; Stoltenborg et al., J. Immunol. Methods 175:59-68, 1994; Stitt et al., Cell 80:661-670, 1995.

[0137] Anti-Inflammatory Activity

[0138] Proteins of the present invention may also exhibit anti-inflammatory activity. The anti-inflammatory activity may be achieved by providing a stimulus to cells involved in the inflammatory response, by inhibiting or promoting cell-cell interactions (such as, for example, cell adhesion), by inhibiting or promoting chemotaxis of cells involved in the inflammatory process, inhibiting or promoting cell extravasation, or by stimulating or suppressing production of other factors which more directly inhibit or promote an inflammatory response. Proteins exhibiting such activities can be used to treat inflammatory conditions including chronic or acute conditions), including without limitation inflammation associated with infection (such as septic shock, sepsis or systemic inflammatory response syndrome (SIRS)), ischemia-reperfusion injury, endotoxin lethality, arthritis, complement-mediated hyperacute rejection, nephritis, cytokine or chemokine-induced lung injury, inflammatory bowel disease, Crohn's disease or resulting from over production of cytokines such as TNF or IL-1. Proteins of the invention may also be useful to treat anaphylaxis and hypersensitivity to an antigenic substance or material.

[0139] Tumor Inhibition Activity

[0140] In addition to the activities described above for immunological treatment or prevention of tumors, a protein of the invention may exhibit other anti-tumor activities. A protein may inhibit tumor growth directly or indirectly (such as, for example, via ADCC). A protein may exhibit its tumor inhibitory activity by acting on tumor tissue or tumor precursor tissue, by inhibiting formation of tissues necessary to support tumor growth (such as, for example, by inhibiting angiogenesis), by causing production of other factors, agents or cell types which inhibit tumor growth, or by suppressing, eliminating or inhibiting factors, agents or cell types which promote tumor growth.

[0141] Other Activities

[0142] A protein of the invention may also exhibit one or more of the following additional activities or effects: inhibiting the growth, infection or function of, or killing, infectious agents, including, without limitation, bacteria, viruses, fungi and other parasites; effecting (suppressing or enhancing) bodily characteristics, including, without limitation, height, weight, hair color, eye color, skin, fat to lean ratio or other tissue pigmentation, or organ or body part size or shape (such as, for example, breast augmentation or diminution, change in bone form or shape); effecting biorhythms or caricadic cycles or rhythms; effecting the fertility of male or female subjects; effecting the metabolism, catabolism, anabolism, processing, utilization, storage or elimination of dietary fat, lipid, protein, carbohydrate, vitamins, minerals, cofactors or other nutritional factors or component(s); effecting behavioral characteristics, including, without limitation, appetite, libido, stress, cognition (including cognitive disorders), depression (including depressive disorders) and violent behaviors; providing analgesic effects or other pain reducing effects; promoting differentiation and growth of embryonic stem cells in lineages other than hematopoietic lineages; hormonal or endocrine activity; in the case of enzymes, correcting deficiencies of the enzyme and treating deficiency-related diseases; treatment of hyperproliferative disorders (such as, for example, psoriasis); immunoglobulin-like activity (such as, for example, the ability to bind antigens or complement); and the ability to act as an antigen in a vaccine composition to raise an immune response against such protein or another material or entity which is cross-reactive with such protein.

[0143] Administration and Dosing

[0144] A protein of the present invention (from whatever source derived, including without limitation from recombinant and non-recombinant sources) may be used in a pharmaceutical composition when combined with a pharmaceutically acceptable carrier. Such a composition may also contain (in addition to protein and a carrier) diluents, fillers, salts, buffers, stabilizers, solubilizers, and other materials well known in the art. The term “pharmaceutically acceptable” means a non-toxic material that does not interfere with the effectiveness of the biological activity of the active ingredient(s). The characteristics of the carrier will depend on the route of administration. The pharmaceutical composition of the invention may also contain cytokines, lymphokines, or other hematopoietic factors such as M-CSF, GM-CSF, TNF, IL-1, IL-2, IL-3, IL-4, IL-5, IL-6, IL-7, IL-8, IL-9, IL-10, IL-11, IL-12, IL-13, IL-14, IL-15, IFN, TNF0, TNF1, TNF2, G-CSF, Meg-CSF, thrombopoietin, stem cell factor, and erythropoietin. The pharmaceutical composition may further contain other agents which either enhance the activity of the protein or compliment its activity or use in treatment. Such additional factors and/or agents may be included in the pharmaceutical composition to produce a synergistic effect with protein of the invention, or to minimize side effects. Conversely, protein of the present invention may be included in formulations of the particular cytokine, lymphokine, other hematopoietic factor, thrombolytic or anti-thrombotic factor, or anti-inflammatory agent to minimize side effects of the cytokine, lymphokine, other hematopoietic factor, thrombolytic or anti-thrombotic factor, or anti-inflammatory agent.

[0145] A protein of the present invention may be active in multimers (e.g., heterodimers or homodimers) or complexes with itself or other proteins. As a result, pharmaceutical compositions of the invention may comprise a protein of the invention in such multimeric or complexed form.

[0146] The pharmaceutical composition of the invention may be in the form of a complex of the protein(s) of present invention along with protein or peptide antigens. The protein and/or peptide antigen will deliver a stimulatory signal to both B and T lymphocytes. B lymphocytes will respond to antigen through their surface immunoglobulin receptor. T lymphocytes will respond to antigen through the T cell receptor (TCR) following presentation of the antigen by MHC proteins. MHC and structurally related proteins including those encoded by class I and class II MHC genes on host cells will serve to present the peptide antigen(s) to T lymphocytes. The antigen components could also be supplied as purified MHC-peptide complexes alone or with co-stimulatory molecules that can directly signal T cells. Alternatively antibodies able to bind surface immunolgobulin and other molecules on B cells as well as antibodies able to bind the TCR and other molecules on T cells can be combined with the pharmaceutical composition of the invention.

[0147] The pharmaceutical composition of the invention may be in the form of a liposome in which protein of the present invention is combined, in addition to other pharmaceutically acceptable carriers, with amphipathic agents such as lipids which exist in aggregated form as micelles, insoluble monolayers, liquid crystals, or lamellar layers in aqueous solution. Suitable lipids for liposomal formulation include, without limitation, monoglycerides, diglycerides, sulfatides, lysolecithin, phospholipids, saponin, bile acids, and the like. Preparation of such liposomal formulations is within the level of skill in the art, as disclosed, for example, in U.S. Pat. Nos. 4,235,871; 4,501,728; 4,837,028; and 4,737,323, all of which are incorporated herein by reference.

[0148] As used herein, the term “therapeutically effective amount” means the total amount of each active component of the pharmaceutical composition or method that is sufficient to show a meaningful patient benefit, i.e., treatment, healing, prevention or amelioration of the relevant medical condition, or an increase in rate of treatment, healing, prevention or amelioration of such conditions. When applied to an individual active ingredient, administered alone, the term refers to that ingredient alone. When applied to a combination, the term refers to combined amounts of the active ingredients that result in the therapeutic effect, whether administered in combination, serially or simultaneously.

[0149] In practicing the method of treatment or use of the present invention, a therapeutically effective amount of protein of the present invention is administered to a mammal having a condition to be treated. Protein of the present invention may be administered in accordance with the method of the invention either alone or in combination with other therapies such as treatments employing cytokines, lymphokines or other hematopoietic factors. When co-administered with one or more cytokines, lymphokines or other hematopoietic factors, protein of the present invention may be administered either simultaneously with the cytokine(s), lymphokine(s), other hematopoietic factor(s), thrombolytic or anti-thrombotic factors, or sequentially. If administered sequentially, the attending physician will decide on the appropriate sequence of administering protein of the present invention in combination with cytokine(s), lymphokine(s), other hematopoietic factor(s), thrombolytic or anti-thrombotic factors.

[0150] Administration of protein of the present invention used in the pharmaceutical composition or to practice the method of the present invention can be carried out in a variety of conventional ways, such as oral ingestion, inhalation, topical application or cutaneous, subcutaneous, intraperitoneal, parenteral or intravenous injection. Intravenous administration to the patient is preferred.

[0151] When a therapeutically effective amount of protein of the present invention is administered orally, protein of the present invention will be in the form of a tablet, capsule, powder, solution or elixir. When administered in tablet form, the pharmaceutical composition of the invention may additionally contain a solid carrier such as a gelatin or an adjuvant. The tablet, capsule, and powder contain from about 5 to 95% protein of the present invention, and preferably from about 25 to 90% protein of the present invention. When administered in liquid form, a liquid carrier such as water, petroleum, oils of animal or plant origin such as peanut oil, mineral oil, soybean oil, or sesame oil, or synthetic oils may be added. The liquid form of the pharmaceutical composition may further contain physiological saline solution, dextrose or other saccharide solution, or glycols such as ethylene glycol, propylene glycol or polyethylene glycol. When administered in liquid form, the pharmaceutical composition contains from about 0.5 to 90% by weight of protein of the present invention, and preferably from about 1 to 50% protein of the present invention.

[0152] When a therapeutically effective amount of protein of the present invention is administered by intravenous, cutaneous or subcutaneous injection, protein of the present invention will be in the form of a pyrogen-free, parenterally acceptable aqueous solution. The preparation of such parenterally acceptable protein solutions, having due regard to pH, isotonicity, stability, and the like, is within the skill in the art. A preferred pharmaceutical composition for intravenous, cutaneous, or subcutaneous injection should contain, in addition to protein of the present invention, an isotonic vehicle such as Sodium Chloride Injection, Ringer's Injection, Dextrose Injection, Dextrose and Sodium Chloride Injection, Lactated Ringer's Injection, or other vehicle as known in the art. The pharmaceutical composition of the present invention may also contain stabilizers, preservatives, buffers, antioxidants, or other additives known to those of skill in the art.

[0153] The amount of protein of the present invention in the pharmaceutical composition of the present invention will depend upon the nature and severity of the condition being treated, and on the nature of prior treatments which the patient has undergone. Ultimately, the attending physician will decide the amount of protein of the present invention with which to treat each individual patient. Initially, the attending physician will administer low doses of protein of the present invention and observe the patient's response. Larger doses of protein of the present invention may be administered until the optimal therapeutic effect is obtained for the patient, and at that point the dosage is not increased further. It is contemplated that the various pharmaceutical compositions used to practice the method of the present invention should contain about 0.01 μg to about 100 mg (preferably about 0.1 ng to about 10 mg, more preferably about 0.1 μg to about 1 mg) of protein of the present invention per kg body weight.

[0154] The duration of intravenous therapy using the pharmaceutical composition of the present invention will vary, depending on the severity of the disease being treated and the condition and potential idiosyncratic response of each individual patient. It is contemplated that the duration of each application of the protein of the present invention will be in the range of 12 to 24 hours of continuous intravenous administration. Ultimately the attending physician will decide on the appropriate duration of intravenous therapy using the pharmaceutical composition of the present invention.

[0155] Protein of the invention may also be used to immunize animals to obtain polyclonal and monoclonal antibodies which specifically react with the protein. Such antibodies may be obtained using either the entire protein or fragments thereof as an immunogen. The peptide immunogens additionally may contain a cysteine residue at the carboxyl terminus, and are conjugated to a hapten such as keyhole limpet hemocyanin (KLH). Methods for synthesizing such peptides are known in the art, for example, as in R. P. Merrifield, J. Amer.Chem.Soc. 85, 2149-2154 (1963); J. L. Krstenansky, et al., FEBS Lett. 21, 10 (1987). Monoclonal antibodies binding to the protein of the invention may be useful diagnostic agents for the immunodetection of the protein. Neutralizing monoclonal antibodies binding to the protein may also be useful therapeutics for both conditions associated with the protein and also in the treatment of some forms of cancer where abnormal expression of the protein is involved. In the case of cancerous cells or leukemic cells, neutralizing monoclonal antibodies against the protein may be useful in detecting and preventing the metastatic spread of the cancerous cells, which may be mediated by the protein.

[0156] For compositions of the present invention which are useful for bone, cartilage, tendon or ligament regeneration, the therapeutic method includes administering the composition topically, systematically, or locally as an implant or device. When administered, the therapeutic composition for use in this invention is, of course, in a pyrogen-free, physiologically acceptable form. Further, the composition may desirably be encapsulated or injected in a viscous form for delivery to the site of bone, cartilage or tissue damage. Topical administration may be suitable for wound healing and tissue repair. Therapeutically useful agents other than a protein of the invention which may also optionally be included in the composition as described above, may alternatively or additionally, be administered simultaneously or sequentially with the composition in the methods of the invention. Preferably for bone and/or cartilage formation, the composition would include a matrix capable of delivering the protein-containing composition to the site of bone and/or cartilage damage, providing a structure for the developing bone and cartilage and optimally capable of being resorbed into the body. Such matrices may be formed of materials presently in use for other implanted medical applications.

[0157] The choice of matrix material is based on biocompatibility, biodegradability, mechanical properties, cosmetic appearance and interface properties. The particular application of the compositions will define the appropriate formulation. Potential matrices for the compositions may be biodegradable and chemically defined calcium sulfate, tricalciumphosphate, hydroxyapatite, polylactic acid, polyglycolic acid and polyanhydrides. Other potential materials are biodegradable and biologically well-defined, such as bone or dermal collagen. Further matrices are comprised of pure proteins or extracellular matrix components. Other potential matrices are nonbiodegradable and chemically defined, such as sintered hydroxapatite, bioglass, aluminates, or other ceramics. Matrices may be comprised of combinations of any of the above mentioned types of material, such as polylactic acid and hydroxyapatite or collagen and tricalciumphosphate. The bioceramics may be altered in composition, such as in calcium-aluminate-phosphate and processing to alter pore size, particle size, particle shape, and biodegradability.

[0158] Presently preferred is a 50:50 (mole weight) copolymer of lactic acid and glycolic acid in the form of porous particles having diameters ranging from 150 to 800 microns. In some applications, it will be useful to utilize a sequestering agent, such as carboxymethyl cellulose or autologous blood clot, to prevent the protein compositions from disassociating from the matrix.

[0159] A preferred family of sequestering agents is cellulosic materials such as alkylcelluloses (including hydroxyalkylcelluloses), including methylcellulose, ethylcellulose, hydroxyethylcellulose, hydroxypropylcellulose, hydroxypropyl-methylcellulose, and carboxymethylcellulose, the most preferred being cationic salts of carboxymethylcellulose (CMC). Other preferred sequestering agents include hyaluronic acid, sodium alginate, poly(ethylene glycol), polyoxyethylene oxide, carboxyvinyl polymer and poly(vinyl alcohol). The amount of sequestering agent useful herein is 0.5-20 wt %, preferably 1-10 wt % based on total formulation weight, which represents the amount necessary to prevent desorbtion of the protein from the polymer matrix and to provide appropriate handling of the composition, yet not so much that the progenitor cells are prevented from infiltrating the matrix, thereby providing the protein the opportunity to assist the osteogenic activity of the progenitor cells.

[0160] In further compositions, proteins of the invention may be combined with other agents beneficial to the treatment of the bone and/or cartilage defect, wound, or tissue in question. These agents include various growth factors such as epidermal growth factor (EGF), platelet derived growth factor (PDGF), transforming growth factors (TGF-α and TGF-β), and insulin-like growth factor (IGF).

[0161] The therapeutic compositions are also presently valuable for veterinary applications. Particularly domestic animals and thoroughbred horses, in addition to humans, are desired patients for such treatment with proteins of the present invention.

[0162] The dosage regimen of a protein-containing pharmaceutical composition to be used in tissue regeneration will be determined by the attending physician considering various factors which modify the action of the proteins, e.g., amount of tissue weight desired to be formed, the site of damage, the condition of the damaged tissue, the size of a wound, type of damaged tissue (e.g., bone), the patient's age, sex, and diet, the severity of any infection, time of administration and other clinical factors. The dosage may vary with the type of matrix used in the reconstitution and with inclusion of other proteins in the pharmaceutical composition. For example, the addition of other known growth factors, such as IGF I (insulin like growth factor I), to the final composition, may also effect the dosage. Progress can be monitored by periodic assessment of tissue/bone growth and/or repair, for example, X-rays, histomorphometric determinations and tetracycline labeling.

[0163] Polynucleotides of the present invention can also be used for gene therapy. Such polynucleotides can be introduced either in vivo or ex vivo into cells for expression in a mammalian subject. Polynucleotides of the invention may also be administered by other known methods for introduction of nucleic acid into a cell or organism (including, without limitation, in the form of viral vectors or naked DNA).

[0164] Cells may also be cultured ex vivo in the presence of proteins of the present invention in order to proliferate or to produce a desired effect on or activity in such cells. Treated cells can then be introduced in vivo for therapeutic purposes.

[0165] Patent and literature references cited herein are incorporated by reference as if fully set forth.

The application's sequence listing, which the Patent Office published only in electronic form, follows.

SEQUENCE LISTING (598 sequences)

SEQ ID NO: 1 - DNA, 1800 bp, Homo sapiens
acagacagaactgcggcttttggaacagaaagttgagcttgcgcagctgcaagaagaatggaatgaacataatgccaaaataattaaatatataagaactaagacaaagccccatttgttttatattcctggaagaatgtgtccagctacccaaaaactaatagaagagtcacagagaaaaatgaacgctttatttgaaggtagacgcatcgaatttgcagaacaaataaataaaatggaggctaggcctagaagacaatcaatgaaggaaaaagagcatcaggtggtgcgtaatgaagaacagaaggcggaacaagaagagggtaaggtggctcagcgagaggaagagttggaggagacaggtaatcagcacaatgatgtagaaatagaggaagcaggagaggaagaggaaaaggaaatagcgattgttcatagtgatgcagagaaagaacaggaggaggaagaacaaaaacaggaaatggaggttaagatggaggaggaaactgaggtaagggaaagtgagaagcagcaggatagtcagcctgaagaagttatggatgtgctagagatggttgagaatgtcaaacatgtaattgctgaccaggaggtaatggaaactaatcgagttgaaagtgtagaaccttcagaaaatgaagctagcaaagaattggaaccagaaatggaatttgaaattgagccagataaagaatgtaaatccctttctcctgggaaagagaatgtcagtgctttagacatggaaaaggagtctgaggaaaaagaagaaaaagaatctgagccccaacctgagcctgtggctcaacctcagcctcagtctcagccccagcttcagcttcaatcccagtcccaaccagtactccagtcccagcctccctctcagcctgaggatttgtcattagctgttttacagccaacaccccaagttactcaggagcaagggcatttactacctgagaggaaggattttcctgtagagtctgtaaaactcactgaggtaccagtagagccagtcttgacagtacatccagagagcaagagcaaaaccaaaactaggagcagaagtagaggtcgagctagaaataaaacaagcaagagtagaagtcgaagcagtagcagtagcagttctagtagcagttcaaccagtagcagcagtggaagtagttccagcagtggaagtagtagcagtcgcagtagttccagtagcagctccagtacaagtggcagcagcagcagagatagtagcagtagcactagtagtagtagtgagagtagaagtcggagtaggggtcggggacataatagagatagaaagcacagaagaggcgtggatcggaagagaagggatacttcaggactagaaagaagtcacaaatcttcaaaaggtggtggtagtagagatacaaaaggatcaaaggataagaattcccggtccgacagaaagaggtctatatcagagagtagtcgatcaggcaaaagatcttcaagaagtgaaagagcccgaaaatcagacaggaaagacaaaaggcgttaatggaagaagccaggctttcttagccattctttgcagcagaagatttcttgataaaaaaggattacctttccttgtaaagaggatgctgccttaagaattgcatgttgtaaaaaatctttttggaaaatacagactgtttgtttaccagacattcttgtactttttgcataattttgtaagagttatttatcaaaattatgtgaggttccaaaatatgtaaaaatgataataataaaaaaagattaacatcc

SEQ ID NO: 2 - DNA, 746 bp, Homo sapiens
tcggccgccaccccagaaggctggagcagggacgccgtcgctccggccgcctgctcccctcgggtccccgtgcgagcccacgccggccccggtgcccgcccgcagccctgccactggacacaggataaggcccagcgcacaggcccccacgtggacagcatggaccgcggcacgctccctctggctgttgccctgctgctggccagctgcagcctcagccccacaagtcttgcagaaacagtccattgtgaccttcagcctgtgggccccgagaggggcgaggtgacatataccactagccaggtctcgaagggctgcgtggctcaggcccccaatgccatccttgaagtccatgtcctcttcctggagttcccaacgggcccgtcacagctggagctgactctccaggcatccaagcaaaatggcacctggccccgagaggtgcttctggtcctcagtgtaaacagcagtgtcttcctgcatctccaggccctgggaatcccactgcacttggcctacaattccagcctggtcaccttccaagagcccccgggggtcaacaccacagagctgccatccttccccaagacccagatccttgagtgggcagctgagaggggccccatcacctctgctgctgagctgaatgacccccagagcatcctcctccgactgggccaagcccaggggtcactgtccttctgcatgctggaagccagccaggacatgggccgcacgctcgagtg

SEQ ID NO: 3 - DNA, 1300 bp, Homo sapiens
tttctctctcagctctccgtctctctttctctctcagcctctttctttctccctgtctcccccactgtcagcacctcttctgtgtggtgagtggaccgcttaccccactaggtgaagatgtcagcccaggagagctgcctcagcctcatcaagtacttcctcttcgttttcaacctcttcttcttcgtcctcggcagcctgatcttctgcttcggcatctggatcctcatcgacaagaccagcttcgtgtcctttgtgggcttggccttcgtgcctctgcagatctggtccaaagtcctggccatctcaggaatcttcaccatgggcatcgcctcctgggttgtgtgggggccctcaaggagctccgctgcctcctgggcctgtattttgggatgctgctgctcctgtttgccacacagatcaccctgggaatcctcatctccactcagcgggcccagctggagcgaagttgcgggacgtcgtagagaaaaccatccaaaagtacggcaccaaccccgaggagaccgcggccgaggagagctgggactatgtgcagttccagctgcgctgctgcggctggcactacccgcagactggttccaagtcctcatcctgagaggtaacgggtcggaggcgcaccgcgtgccctgctcctgctacaacttgtcggcgaccaacgactccacaatcctagataaggtgatcttgccccagctcagcaggcttggacacctggcgcggtccagacacagtgcagacatctgcgctgtccctgcagagagccacatctaccgcgagggctgcgcgcagggcctccagaagtggctgcacaacaaccttatttccatagtgggcatttgcctgggcgtcggcctactcgagctcgggttcatgacgctctcgatattcctgtgcagaaacctggaccacgtctacaaccggctcgctcgataccgttaggccccgccctccccaaagtcccgccccgcccccgtcacgtgcgctgggcacttccctgctgcctgtaaatatttgtttaatccccagttcgcctggagccctccgccttcacattcccctggggacccacgtggctgcgtgcccctgctgctgtcacctctcccacgggacctggggctttcgtccacagcttcctgtccccatctgtcggcctaccaccacccacaagattatttttcacccaaacctcaaataaatcccctgcgtttttggtaaaaaaaaaaaaaaaaaaaaaaaaaaaaaaaaaaaaaaaaaaaaaaaaaaaaaaaaaaaaaaaatt

SEQ ID NO: 4 - DNA, 1055 bp, Homo sapiens
cgcagcgcggctgtatttgcggcctgtgcgagtaggcgcttgggcactcagtctccctggcgagcgacgggcagaaatctcgaaccagtggagcgcactcgtaacctggatcccagaaggtcgcgaaggcagtaccgtttcctcagcggcggactgctgcagtaagaatgtcttttccacctcatttgaatcgccctcccatgggaatcccagcactcccaccagggatcccacccccgcagtttccaggatttcctccacctgtacctccagggaccccaatgattcctgtaccaatgagcattatggctcctgctccaactgtcttagtacccactgtgtctatggttggaaagcatttgggcgcaagaaaggatcatccaggcttaaaggctaaagaaaatgatgaaaattgtggtcctactaccactgtttttgttggcaacatttccgagaaagcttcagacatgcttataagacaactcttagctaaatgtggtttggttttgagctggaagagagtacaaggtgcttccggaaagcttcaagccttcggattctgtgagtacaaggagccagaatctaccctccgtgcactcagattattacatgacctgcaaattggagagaaaaagctactcgttaaagttgatgcaaagacaaaggcacagctggatgaatggaaagcaaagaagaaagcttctaatgggaatgcaaggccagaaactgtcactaatgacgatgaagaagccttggatgaagaaacaaagaggagagatcagatgattaaaggggctattgaagttttaattcgtgaatactccagtgagctaaatgccccctcacaggaatctgattctccccccaggaagaagaagaaggaaaagaaggaggacattttccgcagatttccagtggccccactgatcccttatccactcatcactaaggaggatataaatgctatagaaatggaagaagacaaaagagacctgatatctcgagagatcagcaaattcagagacacacataagaaactggaagaagagaaaggc

SEQ ID NO: 5 - DNA, 2076 bp, Homo sapiens
agctctctgcctgcccagactagctgcacctcctcattccctgcgcccccttcctctccggaagcccccaggatggtgaggtggtttcaccgagacctcagtgggctggatgcagagaccctgctcaagggccgaggtgtccacggtagcttcctggctcggcccagtcgcaagaaccagggtgacttctcgctctccgtcagggtgggggatcaggtgacccatattcggatccagaactcaggggatttctatgacctgtatggaggggagaagtttgcgactctgacagagctggcggagtactacactcagcagcagggtgtcctgcaggaccgcgacggcaccatcatccacctcaagtacccgctgaactgctccgatcccactagtgagaggtggtaccatggccacatgtctggcgggcaggcagagacgctgctgcaggccaagggcgagccctggacgtttcttgtgcgtgagagcctcagccagcctggagacttcgtgctttctgtgctcagtgaccagcccaaggctggcccaggctccccgctcagggtcacccacatcaaggtcatgtgcgagggtggacgctacacagtgggtggtttggagaccttcgacagcctcacggacctggtggagcatttcaagaagacggggattgaggaggcctcaggcgcctttgtctacctgcggcagccgtactatgccacgagggtgaatgcggctgacattgagaaccgagtgttggaactgaacaagaagcaggagtccgaggatacagccaaggctggcttctgggaggagtttgagagtttgcagaagcaggaggtgaagaacttgcaccagcgtctggaagggcagcggccagagaacaagggcaagaaccgctacaagaacattctcccctttgaccacagccgagtgatcctgcagggacgggacagtaacatccccgggtccgactacatcaatgccaactacatcaagaaccagctgctaggccctgatgagaacgctaagacctacatcgccagccagggctgtctggaggccacggtcaatgacttctggcagatggcgtggcaggagaacagccgtgtcatcgtcatgaccacccgagaggtggagaaaggccggaacaaatgcgtcccatactggcccgaggtgggcatgcagcgtgcttatgggccctactctgtgaccaactgcggggagcatgacacaaccgaatacaaactccgtaccttacaggtctccccgctggacaatggagacctgattcgggagatctggcattaccagtacctgagctggcccgaccatggggtccccagtgagcctgggggtgtcctcagcttcctggaccagatcaaccagcggcaggaaagtctgcctcacgcagggcccatcatcgtgcactgcagcgccggcatcggccgcacaggcaccatcattgtcatcgacatgctcatggagaacatctccaccaagggcctggactgtgacattgacatccagaagaccatccagatggtgcgggcgcagcgctcgggcatggtgcagacggaggcgcagtacaagttcatctacgtggccatcgcccagttcattgaaaccactaagaagaagctggaggtcctgcagtcgcagaagggccaggagtcggagtacgggaacatcacctatcccccagccatgaagaatgcccatgccaaggcctcccgcacctcgtccaaacacaaggaggatgtgtatgagaacctgcacactaagaacaagagggaggagaaagtgaagaagcagcggtcagcagacaaggagaagagcaagggttccctcaagaggaagtgagcggtgctgtcctcaggtggccatgcctcagccctgaccctgtggaagcatttcgcgatggacagactcacaacctgaacctaggagtgccccattcttttgtaatttaaatggctgcatcccccccacctctccctgaccctgtatatagcccagccaggccccaggcagggccaacccttctcctcttgtaaataaagccctgggatcactgtg

SEQ ID NO: 6 - DNA, 2428 bp, Homo sapiens
cccgctggtcatcttctacctgtccttcatctccatggtgatctgcaccctcaaggtgttccaggacagcaaggcctgggagaacttccgcaccctcaccgacctgctgctgcgcttcgagcccaacctggatgtggagcaggccgaggtcaacttcggctggaaccacctggagccctatgcccatttcctgctctctgtcttcttcgtcatcttctccttccccatcgccagcaaggactgcatcccctgctcggagctggctgtcatcaccggcttctttaccgtgaccagctacctgagcctgagcacccatgcagagccctacacgcgcagggccctggccaccgaggtcaccgccggcctgctatcgctgctgccctccatgcccttgaattggccctacctgaaggtccttggccagaccttcatcaccgtgcctgtcggccacctggtcgtcctcaacgtcagcgtcccgtgcctgctctatgtctacctgctctatctcttcttccgcatggcacagctgaggaatttcaagggcacctactgctaccttgtgccctacctggtgtgcttcatgtggtgtgagctctccgtggtcatcctgctggagtccaccggcctggggctgctccgcgcctccatcggctacttcctcttcctctttgccctccccatcctggtggccggcctggccctggtgggcgtgctgcagttcgcccggtggttcacgtctctggagctcaccaagatcgcagtcaccgtggcggtctgtagtgtgcccctgctgttgcgctggtggaccaaggccagcttctctgtggtggggatggtgaagtccctgacgcggagctccatggtcaagctcatcctggtgtggctcacggccatcgtgctgttctgctggttctatgtgtaccgctcagagggcatgaaggtctacaactccacactgacctggcagcagtatggtgcgctgtgcgggccacgcgcctggaaggagaccaacatggcgcgcacccagatcctctgcagccacctggagggccacagggtcacgtggaccggccgcttcaagtacgtccgcgtgactgacatcgacaacagcgccgagtctgccatcaacatgctcccgttcttcatcggcgactggatgcgctgcctctacggcgaggcctaccctgcctgcagccctggcaacacctccacggccgaggaggagctctgtcgccttaagctgctggccaagcacccctgccacatcaagaagttcgaccgctacaagtttgagattaccgtgggcatgccattcagcagcggcgctgacggctcgcgcagccgcgaggaggacgacgtcaccaaggacatcgtgctgcgggccagcagcgagttcaagagcgtgctgctcagcctgcgccagggcagcctcatcgagttcagcaccatcctggagggccgcctgggcagcaagtggcctgtcttcgagctcaaggccatcagctgcctcaactgcatggcccagctctcacccaccaggcggcacgtgaagatcgagcacgactggcgcagcaccgtgcatggcgccgtgaagttcgccttcgacttctttttcttcccattcctgtcggcggcctgaggatggtccgccacgaggagcttccagtgcatgttgccatgaggcctttccccagtgtggccccagcccgacaggcatgcaccagtgccgcctgtgcccacgtgtgcagactgtggctgcagagaccttgcgaccatgtgtagattgcgtggaccccgacaaagggaaggctgctgtgtagctctgtccactctgaataccaagtgtgttgggaattgcatgccatctccaccctgagcctgacctttctgagtgacatgggtgtgccaggctagactaggaggttccggtgtctggaaaagcactttacagatgagattccctctcctcccccaccttcaagcaccctgttccctctttctttcttttgtgttggatttgtttaaaaaccaaataagcatctgtgtaacctccacagtagcatttcttatttgtttggtcactgctacaccttagcagctcttcccctttcctgggggatgtgcacggcagcttgagcctgtcacgtggtcaaggcccggccccatcagaggctgggggaggcggcacattggcagtgtgtcacactgagctgggcaccacaggctgcctcatgaccctcctgtccagcaggtagtgggtgaatgtgtgaaggtcttgcctgaatccatcaggacttgggaaacagagaaccctgtgggggcggctgtgggggaggtccctgccagtgtttagaagagcctgactgtgttcagtgccttggagcagaaagccagggtcctgagtggctgaaataaaagcctctggtgg

SEQ ID NO: 7 - DNA, 2568 bp, Homo sapiens
atcccggcagtctggcttcagcacataaccgccatgccatgctacttggtgttagcagccttctctggggagtaagtgaggggtggccctatcccggtgcaagggttccagaagctggaggtggtgcagacccgatctcactggaaggtttagctgcagccacactggcttgccctgtaatgacattcaactttgtttccttttgcacatttcagcagaatgtttgcatagtcctggtctttgtccaatctactgcagcgctccagggcctgctaccttctgtcttggtctctgatttcatgcactaagaggctggagcccaaacaggcccctctgctccctcctgcccccagtgactcaacccctggcctcagggtggagtggtgtggctgccttggttcaaggtgggcacactggcgtggatgcggcatgggctcccagcccagcccatttgacctctctcaaactgtttcctacctcattgggccctttgaacataaaataagacagagcacatcagcaccgagcgtgtggttcatgggttgtacaagtcagctggtatcatttttaaaaagttatttaaggaactaggacttcatcaggccatatataagtaaaaagcagtacagacttagaatttcagatgtataaatataaaactatgtcaaaaccagtttgtaaaagcacagtgggctagggcttagtgaaatgacaactttcaacagcattgcacacttggctactgtggaatagagactttcctatggagtagagagaatgagaaatgcgaagtggtcgtattgaaatggagacagctggatgctcggcccccctttccctcttcttcctaccacacttcctttcttttgggaaactgcccctgctccacttcatctgactttggtggcagtgccaatcactgaacccgccccaccaccacagggattggcccagggacgggcacatgactgaggtggccaatcggagttcctccctgagatttcatgtactaggaatgagactcattcctgtgagggcttcccaggtgggctgatggaagtctagggctgttcatggtcctgtcttcccttcccccatcatatggagtaagcccttttgaactaggggaaagtgaggccacctcctacagaaaaacacagcagatagatggagacaatctggtctgagtccctggacccagctgtgcctgaagcccagaccatcttcttctcagctccatgttccaatatctgttttgcaatcaagctaatttgaggtgggatcctttaatttgcaaccaaaatatttcttattaaatttaaatcagaggaaatcacctccctctgggccttggtttactcatctgggaatgaggcacaagacttggctgcaatccctcagacccttccagctgtgagatcctctagaattgctccagcctttgatctctaggctctgctgacctcctcctcagaggtccccagggtcctcccaccgcagccctgagtcctcagctgctccaccagcatggcaatgcaggcctccagctcccccagggtatgggcatggttggcaccgccgaagtgaccaaagtaagtcatgagcttctccgccgtctggtcatcacacctgcctctgcagctggagagccgggccagcagtgtcttggcctcggctgccggcgtcttcttctcctcctgccacctctcctcctccacctcctcctcgtcagaggcggcctggccctccacggagcggaacagctgcttgtccacttcatccagggctctgcttccagagctgctgtctgactgccaggctccctctggagtggggtctgggtctctggtcccagcatcttcaggttcattactcttgtctcctggctctgggttggctagctgcggggttgggagctgggaatcctctgacctgtagcgttgcagctccgcctccagccgccgcacccagcgctgcaagccgggcacctgttgcgccagcgcctccagctctcgcacgcggtgcaggctgcgcagcaccacctgccgggcctcctccgcgcgccgccgcacctcggcctggccacggcgcagccgcccagcgcgggcctccgccgcagccagggcgccctgcgcctgacgcagctcccgcaccgcagcctccggcccgccgtgccccatctcgtgggtgctcgcctggctcttccagagtccgacctgcagtgctaggcagcgcgcatcactgctctgcagcgcggcgcgcaggtcctccaccaactcgcgcaagctgctattctcctcctccagccgcgcaacgcgctcacagtcaggaccgctgtcggggccaggcgcgcagggcgggcggcggcggcggcgcggacggcgcaggcggatctgcgtctcgatgtgctcgctgagagcgccgcggggcagccggggccccgcacgggtgccgaagtagccacagaggcgcgcgtggaactggcggaaggtgagctccggcggctcggcgcgcagcgccaggcgcgcctcttcatcggtatctgagtccccgtccgtggccaactca

SEQ ID NO: 8 - DNA, 2175 bp, Homo sapiens
ttcctgcatcaacagtgctttgggaagctgtgtggattcctgaggaagaacagggagccgagatggagccacacatgagtttgctcaccggctactgcagcactttgtactcagaatctcatgtccacaaaccccatgtaaactttcaaccactcaaagctgtttattcggctgaagaaataacttttttttctcacccagtcatttgtacctcttcatatggctatgtcgcaccctccagaaacgtggttatacttccagtcagtgtgggagaactgaagacttccggttggtcgaggaactgagggttgaccttcgggaaggaagttccactcatcttatttattatgcctgtgatgtgggtcctgccagggagacatccagtactcggtgtctttaattgccacctggggaactgtgtttattggccttctttggggcatcctggttttggatgaagtgaggggaatacagaggtaaaagaattgtctccaccctgaagcggggagtcccgcttcacatttctggaaatggtgcagccactggggacagttctgccccgggcatggttgtttcttcaaggtcctctaaatataatccctattcttacataatccttggccctgatggttttaagcaagaactcctgtgtcccatggtctccaccactcaccatcaccctgctgtagcaagagtcctagtcaggggaggtgcattttagtagttaaattgcacttatccatgagataaataaaaggagaactgtttttatcagtggaggctaacctaaaatttcaaagtgtcgcctttttgaaatcttgggcctctctctctgtagaaccaatggccctttgtggctcacggcctcgcacctaactggagagttctgagctcctgcagctcacctgagcccacagactaggcttcttggctccttccgcagcatgcctgctcacccccagaacccgcagctgtgggaagagccatgtagggaggctattcccaggcatacacttccactgccttcagctgacatcacagctgacaaatcatctcctctatcggagccagaagacttcagctccacaaaatgaagtgttctgtcctgaaaacattcttgggaagaatcccaacatcgagaaaacggtgtcctgtgagttccaacaatgcttcttgttcatgggtttcttccgtatggagtggattaagagtgttttattttggtgttctaactgagaaaaaaaggaggcacccacaaggttgaggtcacacagtctccacagtttccaggaggcgtttgggggtggggaaggcacctccagagcatgaggctctaaggggacatgagtaaagcatgtctgtgacccagtgaggaagggataggccagctgcactcctgcacggggttcctagctgcagaagggtcccgcctaggccgaggggaaacacctgatagcagaagaggcctggatgcacacctggcacgccgaggctctccgcccagacacagtgctccatgtcagcccctgcacctggggtgtgtgattcacgtgcacagatgccacaatcctgcaccaatatcccacagatgggggaaggtgagaggaaggggcaagtgatgtgtaactgctcaagagatgcttaaacctccatagagaggagccgggcgcaggggcatctgtgtgtcccgtcacacactgcagcagggaagggtggctggctggctccctggcatcagtggtttggtttaagctccagagggtcttattgccattgtcttttcctctgccccttgagccagcctaaggccctggagtctgtttctttaggcggatgaactgacatgctcctaccatgaccaggctctgggcaaggctcctcacagtatccttgagaggtgggcatggaagtgcccatttctcaggtacagaaaccttcagagaggataaatagcttgccctgtagaagcaggactgaaacccttgtccgcctgactcccccagctactctgcccactgtagccccctgccttactgtcctggcacacccctcaccatcctgtataccttaaatatcaaagagggcaagagagaaagggctttaaagataagttatttttttttaggaaccttaatattatttttaagaagtaaccaaattagtgacgtgaaatgc

SEQ ID NO: 9 - DNA, 2365 bp, Homo sapiens
ttttttttttctgaaaaataaatgattttattgcagggccaatgataggtagtcacaagggcatgaaatggcagatctcttgtctgaagcagagaaggcacactggcagactccatgtgtgtcaaacgctgtgcatgaatcaggtttttagaaggaaggtaggagaggaaaactactcactagcagaactgaactgctgtaaaataggttaaattctttgaaaagtgaaaaatgatagtagcaaaatcatgaagttgtatctgaaccagagccgtgatgtaaccaagtaagatggaagtttccatccagaggagttaattccgaacaagtcacagaaaggtgagagctgccggttccggcacgctgtcttctggagtgccagtgaccgggcaagaaatttgattgtttcctttgattctcttgggaaagaacacatttcccaagcccctggagacccacagggtttggcactgtccgtgaggctgtgctcctgaggacggacgttcaggaggccgtggaggagcagcgctgcaggagcagggtgtggcagctgtcgcacactcgcaccggcttggggtaggagggcagggctagctcgttgctggagcaggtgttgcagaagatgtggccacagttccggcagtggtgctttctccgggaaatggagaactccttctcacactgcctacagtgtgtcgcttcgtcatctttcagccaggcgtggcccttcagtgcctggttcacttcttttatatcttccatcttcagcttggactggctgaggtgcaggcccatttcctggagggcttgttcctgctcctcacagatcttctgcagctctgccttctcgtcctgaagctcccgcaactcctttttcagtccttccacttgttgcagctccatcctgagtagagaggaagtgtctttctcgtgctgtaattcgcgctgaagagcctgtctttgctctttttctgatttcaattctttctccaggcttgagcattgctcgtgcagctgggagagctgcagctgcagggcgccgatcctcccgcccagctcctgctgcagcttgtggctccgctcctcagccccctgcctcgcccgctccgagtgctgcaacctttcttccatttgtttcatgctggacataacttggttggtttttccttcaaaggatgtgatggcttcattcttctgctgcaaactgctctctgcattctgagctttgtgaaacatctgtaaattaatcgctttgacttcttccagctgctggcggagggcaactagtgtgtcctgcttctcgtgggtgtccttttccagtaacttcattgcaatttccatttcggttttcattccaatttgtaactccagttctttttccagttccaaccggactttcttctcctcttttagctgcttccacacatcactgtacatttcatccagaccttgccgagtttgcttgtaagtctccagctcaactttggtatcctgttttgttatctctacactcttttcacttctttctcgaattaattcattttgttctcttaactgctgctgttcttcttgaagtgagcaaattcggtctgttgcagctgaaagctcttcttgaagctttgagttagtcttttccaagccatctatcttggtttgaagatccccaactgtgcagctcaagtgccggttaagttcttccacataatttttttgatcaaggacatcagtaattctttcatgctccttgccaccatcaagatcctgcacatccttaaggtagagggaaaaatctattactccaacctgagaatccaagtcttctcctttcaagcagagattggcatcgagaacattgagtcccaccagcagaccaacaatcaccatcccttcttcctccatcattaaagcctcaggctcatagaactcgcttaagagatgtttattgtctataagcactttcagataatctgccagtttcttttgcatgagtgcaagataaagccacgctcggcctcttcccacagctgtctttaattctggaagatttctgacactagtcgctatatctgatgcttctggacaaagtttctccaccagctccaaaggaccaaagaatgatttattttggccaataaaactcttcttaactttcagcccatgtttgaggcagtgctccatcactacaaagaactgctgcaagggggcatggtccgcatccaggctgcggcccaggctcagagccgactggagcaacaccttgatgctgagtttcatcatgtgcatcaggttggcacgctcctccatcatctggcacttagaagctgcgcgcgccgtgccgtccccgctgtccccgccgcccagcccc

SEQ ID NO: 10 - DNA, 1613 bp, Homo sapiens
tttttttttttgatgttaatgactttactttgagatatgatggaaaaatattacaggtacacatggaaaagacatgatcaccaagtgaaaacaatctaaccagaaagctttaacatctgtcagttaagctgaagctgaaattctgggagcatgacatgctgcagggccaaaaggaatggataattagtattcctctccttcttcctcaccctctccttcaacagaatccacaccaacctcctcataatccttctcaagggcagccatatcttcacgggcctctgaaaactcgccttcctccatcccctcacccacgtaccagtgaacaaaggcacgcttggcatacatcaggtcaaacttgtggtccaggcgagcccaggcctcagcaatggctgtggtgttgctcagcatgcacacagctctctgtaccttggccaggtctccaccaggcaccacagtgggaggctggtagttgatgccaaccttgaagccagtggggcaccaatccacaaactggatgctgcgcttggttttgatggtggcaatggcagcattgacatctttgggaaccacgtcaccacggtacaacaggcagcaagccatgtatttaccatggcgagggtcacatttcaccatctggttggctggctcaaagcaagcattggtgatctctgctacagaaagctgttcatggtaggctttctcagcagagatgacaggggcatatgtggccagagggaagtggatgcgggggtagggcaccaggttggtctggaattctgtcaggtcaacattcagggctccatcaaatctcagggaagcagtgatggaggacacaatctggctaataaggcggttaaggttagtgtaggttgggcgctcgatatcgaggtttctacgacagatgtcatagatggcctcattgtctaccatgaaggcacaatcagagtgctccagggtggtgtgggtggtgaggatggagttgtagggctcaactacagctgtggaaacctggggtgccgggtaaatggagaactccagcttggatttcttgccataatcaactgagagacgttccatgagcagggaggtgaacccagaaccagttcccccaccaaagctgtggaaaaccaagaagccctgaagaccggtgcactggtcagccagcttgcgaattcggtccaacacaaggtcaatgatctccttgccaatggtgtagtgccctcgggcatagttattggcagcatcttccttgcctgtgatgagctgctcagggtggaagagctggcggtaggtgccagtgcgaacttcatcaatgactgtgggttccaagtctacaaacacagcccggggcacgtgcttgccagcgcccgtctcactgaagaaggtgttgaaggagtcatctcctcccccaatggtcttgtcacttggcatctggccatcgggctggatgccgtgttccaggcagtagagctcccagcaggcattgccaatctggacaccagcctggccaacgtggatggagatgcactcacgcatagtggctagggattaggaggcgaaggcgacaggagcagacaccgggtcccggttaccgtccccgaccttagaaa

SEQ ID NO: 11 - DNA, 1841 bp, Homo sapiens
ttttttttttttttttttttttggcaagcatgtccataattacttttttttttttttttttttttacacagttgcattttattacctccacattttgaagcagttcatgaccagcatagtgctttgggggcattttttttttttttcaataaatgaaagcatttaagaaaaaggcacgtattccttgaataggtaagaaaagctccccatctgtcccctccctttttgagggagcagcccctatgggaactcgtattggtaccccagaaacattcagcaaagcaaccattagcctccctgacccctctccccgcttccccagcagctaggatgaaggcaacatattcctcacaggtcatttgatcttgaggtccttcaaggctgactccaagctcttcacatcccagatactcatgccgccatccatgccagtggtgcagaactgcgagcacttggccttgccgccgctgagcaccgagatctggctgacgctgttcttgtgcagcgagtctaggcccgcgcccgcagccgtgccaccctcggagctcgccttcttgtccaggttctggaagcgctcgcgggccgtcaagccacgctgcgagctctgcttaggaacgtccagccgcccgccgaagctcagcatccccgcggcggcgtcataggtgaacagcaccgggaagcagtcgtggcccgctgccaccaggctgttgtctgtgatgaaggtcagcgccagcagtggtagtgtttcagaggccagagtcgcgacggccatcttcttgtcggcatcagccaggcagacggtgctgtcgtggcttacccaggccacgcggctcccgctggctgagaaacagacgccatgtacccagccgcagctactgctggattcgaacatcagttccccaaagggcatcttggagccccacggggtgggtgccggccgttcctccacctccttgatgtaggctgaaaagatccgacacttgaagtcacaggagccggcagccagcagcacattgttggggtgccagtccaggctgaggacggtggagcggatgggcttcttgatgtgcttgcaaacccaccagtcattctcctgctcgaaataacagatggagatcacacgagagccgctgcccacagcaaacttgttctcgttgggggcccagcgcacgcagcgggcagcccggttgatccgcaggatgaccagcgtgggcttccatgtgcggcccttcagcgtccacacgtaggcgttgcggtctgtgccgcaggtcacaatacggttactctcgggggcccagtcgatgcctgtcacctgcccgttgtgctccttgagctcgtgcaccttggtccatttggcaccgctcttttcatagatatgcacctcatggttgttggggcagatggcaatctgggtgcggtccttgttccaggcgtggcagctgatgggctccaccaggaagctgtggtaggccatggcggcttggctcctcccgcgccccggccgcggactgacgacctacgcacacgagaacatgcctctcgcaaaggatctccttcatccctctccagaagaggagaagaggaaacacaagaagaaacgcctggtgcagagccccaattcctacttcatggatgtgaaatgcccaggatgctataaaatcaccacggtctttagccatgcacaaacggtagttttgtgtgttggctgctccactgtcctctgccagcctacaggaggaaaagcaaggcttacagaaggatgttccttcaggaggaagcagcactaaaagcactttgagtcaagatgagtgggaaaccatctcaataaacacattttgggt

SEQ ID NO: 12 - DNA, 3188 bp, Homo sapiens
taatcccagctactcgggaggctgaggcaggagaatcgcttgaaccaggaaggtggaaaggtggaggttgcggtgagctgagattgcaccattgcactccaacctgggcaacaagagcaaaactccatctcaaaaaaaaaaacaaaaaacaaaaaaacaggagaagtttttttcctttagtgttgaaattcagtgttcacatttgatacctctgttgatctgacttcaaattcattgactctttcccctgtcatttctgttctgctgttgaactcatcaagtgagtttttatgttctggttgttatattttccagttctaaaattttcatttgattcttctttatatcctctgtttctttgctgagacattctgtcttttcattagtttcaagaatgtttgtcctaccttgttggaatatttttgtcatgtgaggttgttaatttcaacatttgcatcatcttcttgttttgactgttcatctcttttcttatacaaattcaaattatcttgattcttcatatgctgggaaattttagattgtatcctggaaaatttgaatattatgtcatgaatgtcagggtcttctttaaatcctgtggtgaatattgactttaattttagcagacattcaacctggttgtgttcaacttcaagttccgtgcagcttttcgtgagtgatgattccaaagtctgttcagtttttgaaggctttgcattgctatttagatctgccttgcatgtatatcacctacccactcatctgagatttggctgatggctattcttatagttcagaatgaccttaacgttaggagatacgtactgaattgttttaggtgtgaagagtcatcatgaaagcatgtcaaatagacctgaaaaaaatttatatgcacatatatgcatgcacatatgtgtatacgtaagtttgtatatgtatctaggtgattgttgtgctggttttgcaaattctttttatgttagaaatttctcaagtaaaaatttcagggcaacaaagaaataaataaaggtcaaaaacatgtcattcatctgcttaaaaaccacaaatggcctgtcatctcatgaagtgtaaaagttagattgctttcagtggttgatttggccctgcgggatcagccttccaaccccctaaggcttctcatctcactcagagtaaaagccagaacctgttttttttttttttttttttttaaccttttgtaagacccttcatgagtctatctcttattcctagagcttatcttagttcctgtccatagtaataacccaaccagacaagtatttgtctgaatgaataaatagatgtgtttttgtgacaggttttattgttttcatcaggatgccttgaccatagctatacattattttttgctgttgcagatcatgcactgcctgtaatgttcattacttcctgagcaatagagattattactatccttccttgggctcttaaaaattaagatccgaggctaggctcggtggctcacgtctgtaatcccagcattttgggaggccaaggcaggcagatcacctgaggtcgggagttcgagaccagcctgaccagcctggagaaaccctgtctctactaaaaatacaaaattagctgggcctggtggcgcatgtctgtaatcctagctactcgggaggctgatgcaggagaaccgcttgaaccgggaggcggaggttgtggtgagccaagatcgcgccattggactctagcttgggcaacaagagtgaaactccgtcccaaaaaaaaaaaaaaaaaaaaaaaaggtggagcagccccatttctctctaccctcttaggactcaaaatccctggacttcatataacaaagaagcataggaagatgctgaaaggtggagagaagactgtggccactctagagtcctggggacttgagaaatgacaagggtgtcagttcccctccttactatctcccacatgtctgagtacagggcactgcagaagcctccatccctgaaccaccagtaggcacagacagcaaaactctgagaagagcctgttccccatagccagaggacaggggaagggagggtggtctaacaaaacagagcttttgtcagtactcactctgctccagctaaaccaaggaaactgccctcctcccttcccaggcttcgagagcaggcagcatgcttcggttccccacccagaggctgaaggcatgcctgagcagagagttaatctttcatatcctgcctggcagaagcaggtggtacttcaattcccctgtcaggtggtgctgacagcgcctagtggggagctgatcttccaccctctgcctggtaggagcaggtgatgctctgacttctctgccagggtagtgtcagcaaggcccaggttagggccatatccagcccccaccagccacaatgaggtggtgctagcagggggctaattaccattacacttgacctcttccatccccatcatcccctggtggggaggtgtgagcctccacacccactggtggcaaatgaggtatggaggagcggagcatgctggcactccccacctccccgcccctcctttggtataaatagggcccccgggggtcctgaacttctgctcctggatgcagcaacaaactggcatggcttagcccttggctttcccttccctgtggtagcttggcccagagggtagctgatcttacacagaggcaacagaaatggtgagttggagccacactttggctgggaaagtgtcagtgagctgaactctcaccccatctgtctgcaacaaggcaatgtgagtcatcaccccacttttgtcagggtgatggtggggagtggggggctagtgggtaactgaatgtgcatacccactcatccctggtattaatgcctttttagcagggaagctgcccactaaaagattaaatttgatctggggtctcttaatatcaaaaacatataggatacaattcataccaatttatacaattctacagatcactcataccaagatccaggaatatcacctatgaatgagaaaggaccatcagcaggtgctaactgatttatctgacaaggatttgaaagctgctatgataaaatgtttcaacaagctattacaaattcttttgaaacaaaacattagaaattctcagccaagaaataaaaataatttattaaaacccc

SEQ ID NO: 13 - DNA, 2493 bp, Homo sapiens
  misc_feature 1204: n = a,c,t, or g
agcccgttcgctcacacaaagcccagacgcggagaaaatggcggcaggggtcgaagcggcggcggaggtggcggcgacggagatcaaaatggaggaagagagcggcgcgcccggcgtgccgagcggcaacggggctccgggccctaagggtgaaggagaacgacctgctcagaatgagaagaggaaggagaaaaacataaaaagaggaggcaatcgctttgagccatatgccaatccaactaaaagatacagagccttcattacaaacataccttttgatgtgaaatggcagtcacttaaagacctggttaaagaaaaagttggtgaggtaacatacgtggagctcttaatggacgctgaaggaaagtcaaggggatgtgctgttgttgaattcaagatggaagagagcatgaaaaaagctgcggaagtcctaaacaagcatagtctgagcggaagaccactgaaagtcaaagaagatcctgatggtgaacatgccaggagagcaatgcaaaaggtgatggctacgactggtgggatgggtatgggaccaggtggcccaggaatgattactatcccacccagtatcctaaataatcccaacatcccaaatgagattatccatgcattacaggctggaagacttggatgcacagtatttgtagcaaatctggattataaagttggctggaagaaactgaaggaagtatttagtatggctggtgtggtggtccgagcagacattcttgaagataaagatggaaaaagtcgtggaataggcactgttacttttgaacagtccattgaagctgtgcaagctatatctatgttcaatggccagctgctatttgatagaccaatgcacgtcaagatggatgagagggccttaccaaaaggagatttcttccctcctgagcgtccacaacaacttccccatggccttggtggtattggcatggggttaggaccaggagggcaacccattgatgccaatcacctgaataaaggcatcggaatgggaaacataggtcccgcaggaatgggaatggaaggcataggatttggaataaataaaatgggaggaatggaggggccctttggtggtggtatggaaaacatgggtcgatttggatctgggatgaacatgggcaggataaatgaaatcctaagtaatgcactgaagagaggagagatcattgcaaagcanggaggaggtggaggtggaggaagcgtccctgggatcgagaggatgggtcctggcattgaccgcctcgggggtgccggcatggagcgcatgggcgcgggcctgggccacggcatggatcgcgtgggctccgagatcgagcgcatggcctggtcatggccgcatgggctccgtggagcgcatgggctccggcattgagcgcatgggcccgttggcctcgaccacatgccctccagcattgagcgcatgggccagaccatggagcgcattggctctggcgtggagcgcatgggtgccggcatgggcttcggccttgagcgcatggccgctcccatcgaccgtgtgggccagaccattgagcgcatgggctctggcgtggagcgcatgggccctgccatcgagcgcatgggcctgagcatggagcgcatggtgcccgcaggtatgggagctggcctggagcgcatgggccccgtgatggatcgcatggccaccggcctggagcgcatgggcgccaacaatctggagcggatgggcctggagcgcatgggcgccaacagcctcgagcgcatgggcctggagcgcatgggtgccaacagcctcgagcgcatgggccccgccatgggcccggccctgggcgctggcattgagcgcatgggcctggccatgggtggcggtggcggtgccagctttgaccgtgccatcgagatggagcgtggcaacttcggaggaagcttcgcaggttcctttggtggagctggaggccatgctcctggggtggccaggaaggcctgccagatatttgtgagaaatctgccattcgatttcacatggaagatgctaaaggacaaattcaacgagtgcggccacgtgctgtacgccgacatcaagatggagaatgggaagtccaaggggtgtggtgtggttaagttcgagtcgccagaggtggccgagagagcctgccggatgatgaatggcatgaagctgagtggccgagagattgacgttcgaattgatagaaacgcttaagcagttgccttttttaaacatcgatacgagacctctgaatttgtattttttcttgttaaccattttaatttgttggctggatgtataaagatgtttaaaaaattcagttgctttttggggtaatttgaattacttttttaatgactggggttccatttgactgtttgcattgagattgcaatgtgcgcaattttttttgtagttgtggcatcttgttgacatcgaatatgactttgataataaataccggttcctcaaaaaaaaaa

SEQ ID NO: 14 - DNA, 3699 bp, Homo sapiens
catgctccgggccgcgctgcccgcgctcctgctgccgttgctgggcctcgccgctgctgccgtcgcggactgtccttcgtctacttggattcagttccaagacagttgttacatttttctccaagaagccatcaaagtagaaagcatagaggatgtcagaaatcagtgtactgaccatggagcggacatgataagcatacataatgaagaagaaaatgcttttatactggatactttgaaaaagcaatggaaaggcccagatgatatcctactaggcatgttttatgacacagatgatgcgagtttcaagtggtttgataattcaaatatgacatttgataagtggacagaccaagatgatgatgaggatttagttgacacctgtgcttttctgcacatcaagacaggtgaatggaaaaaaggaaattgtgaagtttcttctgtggaaggaacactatgcaaaacagctatcccatacaaaaggaaatatttatcagataaccacattttaatatcagcattggtgattgctagcacggtaattttgacagttttgggagcaatcatttggttcctgtacaaaaaacattctgattctcgtttcaccacagttttttcaaccgcaccccaatcaccttataatgaagactgtgttttggtagttggagaagaaaatgaatatcctgttcaatttgactaagtttttggtaatcttgcactaagacatcaacaaaatgccctggcagagataacttgggaaagattttaatataaaacttgacattggatattagagctttaatggtattccttattccagtaacatttttatgtactcatctgctgtgaaaagtctttaggttcattaaaaaaacaggttttagaaatgatcttagatctaatatactgattttaagcatcccgtcaaaggcagaatctgcacttgaatgaaggaaagcttaaagcccaagcagataaaaataaaagcccagcctatttgtcttgcctgctgtatcttccctatttagttgacccactttagtttatatgtttattagtaaacatgaaatggggaataagtgattttaagtacatcccatacatttaaatatctttgataattggtatttttttggcagataattcctctagaatgtgtatctttttatgatttagatgaagaaaattttacaacttttaacaccccacaccaattttagtttcattacttttacacacaccattttatcacaaatgactcaagttttaatgaatgtttataaattatttgaaacaaaatatgatcgctgtgtccaggatggcatagagaaagctggcaattaggttaacacttacatattatagtgcccctttaaggatttctctcttgccaccataccttttgtactttcccctatacaagatgtatctcattctcctcaagcatttataaatttttccttcaatgacatgaaaactgtgcaagcaaaaaccgaagaaaaacacttaagtacaactgtagtgacagtgatcaaagttttcagtgcatttattgtacattttaagaaaaaggtgaaaatcatttggggagtaaaaaaatgaaaaagctgaaacgagtaattttcctcaccatcaataaaccaaaaaacaggaaagataaagaatgtataaatttcacgtaaattagtcacgtatcacttatcaatggggatacgttctaagaaatgcatagttagggaatcttctgtgaaaatcagcttgtatttacacaaacccagatggtagagcctattttgtcccaaacctacacagcatgttactgtgctgaatactgcagacaattgtaacacaatatttgtgtatctaaatatagaaaaggtacagtaaaaatatggtctactaaggaaacactgttctatatgtggtccattactgactgaagtatactgtctagaagtctgaggctcaaagaaaagtaatccctcttctgaatccacaccccatcaattatcttactttcttctggggagatagatagatatactatctcactagcttgactaatggcaacaaagttccagcttgtgtagtctctttttattgaccacatgaatcgaaaacactcatcacaattaatggcactatcattaatgagacatgagtaactaaaaagtgatagaaaactattaacagtgcggctacatggtactgaaaatgcaggcattacaccagctgttacacaagcacaagcatgctctgtaagagctttacatttctgagattttgtatagtgattgagatgtctattttattattgatagactattactaatgtcaatattgaacactaccctggaattcctgcctggttttcctacccaaattgtaccactccttgaagaactacaggcacagtaaaaaaatatggcgtattatgtgaactaaaagagttctaaaggagttcttaaaggagtggtagaatttgggtaggaaagtgattaagtccaacttaaaaccaacagtctcaaacgtctacaactacaatgtccaatgagccactagccacatgaggctatttaagtaaatttagtttaaaatccagttttcgaattacattagccacattgtcaagtgttcaaatcacaggtggttagtggctactgtactgggcaacatacattatagaacattttcattataggaagttttattgggcagtgctgctcttaaatcctaccttccactcaactcccatacaactttcttttgtacattttgatactttctacctaatggcagctcttccaaaatagctgctttaaactctgatttaattttcaatatttggtttcatttttcaacaggccaagaggcctctggtaatgaagtgctatatatatatatatatgacggagtctcactgtgctgcccaggctacagtgcagtggctcgatcttggctctctccaatctccgccttgcaggttttcaagcaattctcctgcctcagcctccttagtagctgggaccacagacatctgtcaccacacccagctaactttttgtatttttggtagagacggggtttcgccatattgactgggctggtctcaaactcctgacctcaagtgatccacccaccttggtctcccaaagtgctgggattacatgcgtgagccaccacacttggcctacattttttctttatataccagaacatctataacaggcaccttatctactcattagtgaagagataattggattacacaggcaggcttgtttactacatccagaatgtagaaactgctttcttcaacatcttggttctagctactaataacaatataattctttggcagatattcagaataacattttaaactacattttcttagaaaattgcattcttgtagtgagcagtgtatggtctcttttgttcagaatttaaaactgataaccaatgaaagccttttctcttattcctctaccgtcatttacatgataatctgaagctaatatgacaatatttaaatactaagtggtactagggaactacaagaatactgtaaagcttaagccattgttatcactgtcatttagcatttaataacaaaactatacagaattatgtgcataccaatgaatgttttgtaccatctagttaaattttttaaataaagttttatgggttaagccc

SEQ ID NO: 15 - DNA, 1158 bp, Homo sapiens
gcccggatggaagctccggccgcggagtgatggtggcctcagcgaagatgggccgggcagggaccatggcggtggcagcagaggtggcaggggcggggcggctggcggtagaggaggctgtggtcctcagggggctgtaggtggaggtatggctcgggccagcagcgggaacggcagcgaggaggcctggggggcacttcgggcgccgcaacagcagcttcgagagctgtgcccaggagtgaacaaccagccctacctctgtgagagtggtcactgctgcggggagactggctgctgcacctactactatgagctctggtggttctggctgctctggactgtcctcatcctctttagctgctgttgcgccttccgccaccgacgagctaaactcaggctgcaacaacagcagcggcagcgtgaaatcaacttgttggcctatcatggggcatgccatggggctggtcctttccctaccggttcactgcttgaccttcgcttcctcagcaccttcaagcccccagcctacgaggatgtggttcaccgcccaggcacaccaccccccccttatactgtggccccaggccgccccttgactgcttccagtgaacaaacctgctgttcctcctcatccagctgccctgcccactttgaaggaacaaatgtggaaggtgtttcctcccaccagagtgccccccctcatcaggagggtgagcccggggcaggggtgacccctgcctccacacccccctcctgccgctatcgccgtttaactggcgactccggtattgagctctgcccttgtcctgcctccggtgagggtgagccagtcaaggaggtgagggttagtgccaccctgccagatctggaggactactccccgtgtgcactacccccagagtctgtaccgcagatctttcccatggggctgtcttccagtgaaggggacatcccataagtagttttgagagggtggatgggttacttgcccaccagaaacagccctagttccaactccttgcgttcctttggcccctccctgcctacctagaatctgcctgaaagggctggagaggggcagtattgggggactgtgctagctttacccccgcaggacatacacaggagcctttgatctcattaaagagatgtggttcc

SEQ ID NO: 16 - DNA, 1880 bp, Homo sapiens
ctagggagtccaacgcggtggtgatctcactgcaaacaaccttttccctggcctccaatgtgacgctatttgacctggctgataggatgcagaaatgtgtcaactcctgcaagtcctctgctgaggtctgccagctcttgggatctcagaggcggatctttagagcgggcagcttgtgcaagcggaagagtcccgaatgtgacaaagacacctccatctgcactgacctggacggcgttgccctgtgccagtgcaagtcgggatactttcagttcaacaagatggaccactcctgccgaggtagccacagcttcgcctggggttctgtgcccagtcctgggactctgcctggtgctctgtttctctttcttgctctctctctgtctttgcttaggcgtgaccattctaaactgagggtaactggttcttgttattttgctcgtggcaggattgaatacattatctccttggaataatagcattatctttgactggtgcatgctggtctggccaattaaattcaaaggaagacagaatggaatgcctgtggtagcagtgccttttctttttttttccatttaaaggaagttagaaaaattattgttttaattcccaaagctttatctgttgtctgctaatcttttaaagtggaagtacaagcgtggggtcaggcttatatctttcagaggcagctgaggccagagtcagagcccgactctgcctcactgatcatgtatcaccttgggcaagtcactttgtttctctgagcctcggtttcctctcctgagaaatgggtatggtgatcctctattggatatttattctaagagttaaggaaggcagtggatatagaggccctttgtaagctgtcagcatctgctcttgtatttggtccaggttgttgttgaattaatgagttctggttttaaaggtctcatgaagtgcttgagagcagaaatctaattctactaacctttaaggtgaggcttaaattcatttagtttcagggaaaaactgctcaaagaatgtagtccaagaatactgctttaaaataaaattaattcaggtccaagagcaccacgcaccctgacttataaaaggctgctgcaacttgcaatcaccagaaaaactaacgatataaaggccatcatggatggccagttttcctactcagtcaacaccttgctggtgacagatgtcaatggatgttactggaatctgaataaaaatcacatactggggcgaggcgacatgccacttttctccatcaggacttcccatgagaggacttgttcatcacagataaaaatatatttcagggcagcactcttatcctgagcttcagaccctctgactttgttaggtttggatacaaagttcttctcaagtgcgcatcatcagctctccaggtgggacctgtgatgggttttgaaggggagggccaactctctgtgttgggcctaggtcctgatgtgtgactaggacacagcatgtctcagtgccgtgccagactgccacattgctacaaagagatgatgcttcctcatgccatcttatctgctttaatgcaaagtgttccttgcacctcttagaaatggggagttgagccgggcgtggtgactcacgcctataatttcagcactttgggaggccgaggcgggcagatcacctgagatcgggagttggagaccagcctgaccaacacagagaaaccccgtctctactaaaaatacaaaattagctgggtgtgatgacgcatgcctgtaatcccagctactcgggaagctgaggcaggagaatcgcttgaacccggggagtggaggttgcagtgagccgaaatcacaccattgcaccactgcagcctgggcaacatctgtccc

SEQ ID NO: 17 - DNA, 1190 bp, Homo sapiens
tttcttaaaaaatgtttatttggaaaagtcagcctcttacacaaggttttgtatctatacttttactctgtcaattacagtggtattttaaatgcattgaatataattcattgaatgtctatatctttctgcctcgatttaagtgatattaggttaaaaaaatatttacagttttcattctggtccaccttccctccttatccttatactgaatccatttctctacttttcaggtaagtgaaaggggtcacaaaatttttaggtttgtgtggagggtaaaaatgcatccagcaattctaagcacaacaattttctgtaaggccttctctgaaaaaagagaaggaattacttattaaaactaagcacacttagcaacttctttcccaatcctatctttattcgtttgcctggtgccaaatttttctggccctttttaatttgcaaaccttaaaaaaaaaaaaacaaaaaaacaaaaacaccaaacacacacatatctcacacatagcactaagctagaagcagatataaatgggaccactgtgaatcaaaggggaaaaattccaggaaaaaaaaattccaatagcttcacagtttaactgaggttttggaaaaacttaagtgaattcagctgatgtttgaaatatctgtctacatttaattagatgtgttgtatttaccaaggaggcacaaatatgtagttctgtagattttaatactaacttttccagtaagaaaaataataccaggtgatttcaaaaagggcagtgatctataaacactcaaaatgcatctttgaacaggggagcagaaatagctaatttaatgaaaacaaaccttaagcactttactaaaagtcgataattgatgcccatgccaatgaagagatagatacctgaaataattaggacgacgccacatgcccagtatgtgtatttgtagtctccatacatgtcattgagccgacctaaaagtggtggccccaggaggacaggacagcattccacaatggtcaccaatcccacagcgctggagaacctctggggtccaacaaggtccatcaatgtttcaaacaatacggagctgagccacccgaaggcaaatccaaagaatcccgcatagacacagaatccaacataggtagtggataaaggtgctagcatatgacacactccatttgcaacaactagaaa

SEQ ID NO: 18 - DNA, 2173 bp, Homo sapiens
ggagtctcactctgtcacccaggctggagtgcagtgtcgcgaccttggctcactgcaacctccacctcccaggttcaagcaattctccccacctcagcctccaaagtagctgggattacaggcatgcgcaaccatgcccagctaatttttgtaattttagtagagatgggttttcgcttagtagagatggggtgtttgccaggctggtcccgaactcctgacctcaggtgatccgcccacctcggcctcccaaagtgctggggttacaggcttaagccaccaagcccggccgaccttcttctatttttccattctcctttccaaagccatggccatgcgctcctgtgtacaggtgcataaacacatcagtgtgccatccctcacatgcatgtcgttccccacccctccttcccagggcttctcttggctccagcgttcctctgggaccctctgcagatacagcctgtgctggacccccagccagggtgagggctcattctgctctgtcttccccactgcctcagtttcccccaaaagctgctttcacgtccttctagtagggggcctcccatgggggcaaggatcccctttaggattcaatctttcctctttgggcagttttggctttgagtcccccagggatcagggtgagaatgaagaagagctcagtgagcggaatgacagcagctgggtgggtggtgtggggagaggctgaggggaaggcagcccccccaggggggcctaaccgtggaatcactgcaatttcctctgagatcccgacttggacaaccaggacagggattgaccattcccttcccattccactcggactgtgtccaagcgggggctgtccactgcgggggctgcctccccatcgggtcctaacagctctaagactgggagtggagttcctggaggtgtggggaggggggcgtgttttcaatttagaaaaatctcagccagctcgagccgagagagaatgcgaaagaggaagttcggaaggagcgaggaatggggtgggtggcagcgggggcggctcagtcgctgtcgctcttgtccaccagcacggcgtccgactcctcggtgatctccagcagcgcgtgcacgtcggggctgctcccgcgccgcaggtcgccggcctccccgcgctccgcgccgccctcgtcgtcgtcggcgcccacctccaccatctcggtggccttgagcacttccacctggccctcgcggatcttcttgacgtggaaggtgaagggtggcaccttgtagaccgcggtcttggagcgcgcgtacaccacgtggtcgggcgtgaaggatttgcgcaacttgtcccgcgacgtcttcagtttctcgcgccgctcggcgggcaccaggcgcgtgcccagcttgttcatgcgcttctccagggtgtgccgcgtcttctccaggttttccttggtcttgaggcgcgtcttctccaggttctcgcgggtacgcaccttggtcttctccatcttctccttggagaaggccttcttgaagtcgtccacgcgccgcaggccgctgcgcttgatacgctctgcgcgggactcctcaataacctcctcaacctccaccgcctcgtccgacgaaagctccagcgccgctgcgtcctcctcgggccgctcgccctcgcccagctcctcgccctccttctctggcagcgcctccgactctttcagcgatttgctgatgctcagtttggccggcagcttcacttcatcctggtagatcatgactttaaagttgcggcgccgcagcagctcggcctcgttgacctccagcttcttgatctgccccgcctggcgctccaggctgccgcgcacggtcttcacgttgacgctgaccttgcgcaccttctccagcagcttgctcaccgtattgctcgtggtggcgtgcgccttgcccagcttgctcagctcgccctggatgctctgcactgcgccctccatctccgcctgccgctcctccagctgtgcttgagtcagctggatctggtctacggccccgatgattttgtccaggaggctcagcaccagcacgccgttcacctggtccgacttgatcagctcttctgagccggcccccgacggctcctccgctgcctgagccccagcggaggaaggctccggggcctcggcgtcggggtacccgggaa

SEQ ID NO: 19 - DNA, 1364 bp, Homo sapiens
ccgatccgcccgccggctccccctcccccgatccctcgggtcccgggatgggggggcggtgaggcaggcacagccccccgcccccatggccgcccgtcggagccagaggcggagggggcgccggggggagccgggcaccgccctgctggtcccgctcgcgctgggcctgggcctggcgctggcctgcctcggcctcctgctggccgtggtcagtttggggagccgggcatcgctgtccgcccaggagcctgcccaggaggagctggtggcagaggaggaccaggacccgtcggaactgaatccccagacagaagaaagccaggatcctgcgcctttcctgaaccgactagttcggcctcgcagaagtgcacctaaaggccggaaaacacgggctcgaagagcgatcgcagcccattatgaagttcatccacgacctggacaggacggagcgcaggcaggtgtggacgggacagtgagtggctgggaggaagccagaatcaacagctccagccctctgcgctacaaccgccagatcggggagtttatagtcacccgggctgggctctactacctgtactgtcaggtgcactttgatgaggggaaggctgtctacctgaagctggacttgctggtggatggtgtgctggccctgcgctgcctggaggaattctcagccactgcggcgagttccctcgggccccagctccgcctctgccaggtgtctgggctgttggccctgcggccagggtcctccctgcggatccgcaccctcccctgggcccatctcaaggctgcccccttcctcacctacttcggactcttccaggttcactgaggggccctggtctccccgcagtcgtcccaggctgccggctcccctcgacagctctctgggcacccggtcccctctgccccaccctcagccgctctttgctccagacctgcccctccctctagaggctgcctgggcctgttcacgtgttttccatcccacataaatacagtattcccactcttatcttacaactcccccaccgcccactctccacctcactagctccccaatccctgaccctttgaggcccccagtgatctcgactcccccctggccacagacccccagggcattgtgttcactgtactctgtgggcaaggatgggtccagaagaccccacttcaggcactaagaggggctggacctggcggcaggaagccaaagagactgggcctaggccaggagttcccaaatgtgaggggcgagaaacaagacaagctcctcccttgagaattccctgtggatttttaaaacagatattatttttattattattgtgacaaaatgttgataaatggatattaaatag

SEQ ID NO: 20 - DNA, 1082 bp, Homo sapiens
aacatgctggagccaagtgctaacatgccttggttcaagggatggaaagtcacccgtaaggatggcaatgccagtggaaccacgctgcttgaggctctggactgcatcctaccaccaactcgtccaactgacaagcccttgcgcctgcctctccaggatgtctacaaaattggtggtattggtactgttcctgttggccgagtggagactggtgttctcaaacccggtatggtggtcacctttgctccagtcaacgttacaacggaagtaaaatctgtcgaaatgcaccatgaagctttgagtgaagctcttcctggggacaatgtgggcttcaatgtcaagaatgtgtctgtcaaggatgttcgtcgtggcaacgttgctggtgacagcaaaaatgacccaccaatggaagcagctggcttcactgctcaggtgattatcctgaaccatccaggccaaataagcgccggctatgcccctgtattggattgccacacggctcacattgcatgcaagtttgctgagctgaaggaaaagattgatcgccgttctggtaaaaagctggaagatggccctaaattcttgaagtctggtgatgctgccattgttgatatggttcctggcaagcccatgtgtgttgagagcttctcagactatccacctttgggtcgctttgctgttcgtgatatgagacagacagttgcggtgggtgtcatcaaagcagtggacaagaaggctgctggagctggcaaggtcaccaagtctgcccagaaagctcagaaggctaaatgaatattatccctaatacctgccaccccactcttaatcagtggtggaagaacggtctcagaactgtttgtttcaattggccatttaagtttagtagtaaaagactggttaatgataacaatgcatcgtaaaaccttcagaaggaaaggagaatgttttgtggaccactttggtttttttttttgcgtgtggcagttttaagttattagtttttaaaatcagtactttttaatggaaacaacttgaccaaaaatttgtcacagaattttgagacccattaaaaaagttaaacg

SEQ ID NO: 21 - DNA, 1268 bp, Homo sapiens
tccctctccctttcatcagttaccgtgcagacggtctacgtgcagcaccccatcacctttttggaccgccctatccaaatgtgttgtccttcctgcaacaagatgatcgtgagtcagctgtcctataacgccggtgctctgacctggctgtcctgcgggagcctgtgcctgctggggtgcatagcgggctgctgcttcatccccttctgcgtggatgccctgcaggacgtggaccattactgtcccaactgcagagctctcctgggcacctacaagcgtttgtaggactcagccagacgtggagggagccgggtgccgcaggaagtcctttccacctctcatccagcttcacgcctggtggaggttctgccctggtggtctcacctctccagggggcccaccttcatgtcttcttttggggggaatacgtcgcaaaactaacaaatctccaaaccccagaaattgctgcttggagtcgtgcataggacttgcaaagacattccccttgagtgtcagttccacggtttcctgcctccctgagaccctgagtcctgccatctaactgtgatcattgccctatccgaatatcttcctgtgatctgccatcagtggctcttttttcctgcttccatgggcctttctggtggcagtctcaaactgagaagccacagttgccttatttttgaggctgttctgcccagagctcggctgaaccagcctttagtgcctaccattatcttatccgtctcttcccgtccctgatgacaaagatcttgccttacagactttacaggcttggctttgagattctgtaactgcagacttcattagcacacagattcactttaatttcttaattttttttttaaatacaaggagggggctattaacacccagtacagacatatccacaaggtcgtaaatgcatgctagaaaaatagggctggatcttatcactgccctgtctccccttgtttctctgtgccagatcttcagtgcccctttccatacagggatttttttctcatagagtaattatatgaacagtttttatgacctccttttggtctgaaatacttttgaacaggctggtgtcgaactcctgggctcaagcgatccttctgccttggcctcccgaagtgctgggattgcaggcataagctaccatgctgggcctgaacataatttcaagaggaggatttataaaaccattttctgtaatcaaatgattggtgtcattttcccatttgccaatgtagtctccctcc

SEQ ID NO: 22 - DNA, 1204 bp, Homo sapiens
ttttttttttttttttttttttggagacccagtttccatctactgtttattggacacctacagtagccaagccctgggcggacctgcttatacttatgtaatcgccagcctcacaataaccaggggaggtaggtgttctgaccatggcggacacagtgcgtcccggctggagctactcggcgctgtggacgcgctggtgctgaatgagcttggtgctctggtggaagcggcggccacagtcctggcaggcgaagggcttctctcgtcggtgggtgcgcagatgctgcgtgagcgtgggccgctggcggaaggccttgccacactcagggcatgcgtagggccgttcacccgtgtggatgcgccggtgctgggtgaggttggcgtgctgccgaaagctctggccgcactcggggcaggcgaagggccgttcgcccgtgtggatgcgctggtgctcggtgagccgcgagacctgcgtgaagcccaggccgcactcaccgcagtggtagggcttttcgccggtgtgtgtcctctgatgacgcgtgagcttgaggcgctggctgaagcgctggccacactcggggcaggcaaagggtttctcgcccgtgtgtacgcggagatgctgcgtgagcgtaggccgctggcggaaggccttgccacactcggcgcaggcgaagggccgctccccggtgtggatgcgccggtgctgcgtcaggttggagcgctgccggaagctctggccgcactcggcacaggcgaagggccgctcgccactgtgcacgcgccggtgctgcagcagcactaagcggcggccgaagcgctcgccgcactcgacgcagccaaaggacttgtcgcccgtgtgtaccgcctggtgctccagcagcacggcgcgccgcgcgaagctctcgcggcactcgctgcacggaaaggggccgggaggctcgggcgcaccaggaggggccgggggcttagcgccagggcccgggggatcgccgtggatgcgctggtgctgcagcagattggagcgctgccggaagctctggccgcactcagcgcaacggaaaggctgttcgcccgtgtgcactctcgtatgctcttccaggcgcgcgctgcgcacgaagccctggccacagtcgccgcacacgaacggccgctcctcggtgtgcgtaagctggtggcgcagcaggtgcgagctgcggctgaagct

SEQ ID NO: 23 - DNA, 1728 bp, Homo sapiens
tgagaaaccagagttaaaacctctttggagcttctgaggactcagctggaaccaacgggcacagttggcaacaccatcatgacatcacaacctgttcccaatgagaccatcatagtgctcccatcaaatgtcatcaacttctcccaagcagagaaacccgaacccaccaaccaggggcaggatagcctgaagaaacatctacacgcagaaatcaaagttattgggactatccagatcttgtgtggcatgatggtattgagcttggggatcattttggcatctgcttccttctctccaaattttacccaagtgacttctacactgttgaactctgcttacccattcataggaccctttttttttatcatctctggctctctatcaatcgccacagagaaaaggttaaccaagcttttggtgcatagcagcctggttggaagcattctgagtgctctgtctgccctggtgggtttcattatcctgtctgtcaaacaggccaccttaaatcctgcctcactgcagtgtgagttggacaaaaataatatcccaacaagaagttatgtttcttacttttatcatgattcactttataccacggactgctatacagccaaagccagtctggctggaactctctctctgatgctgatttgcactctgctggaattctgcctagctgtgctcactgctgtgctgcggtggaaacaggcttactctgacttccctgggagtgtacttttcctgcctcacagttacattggtaattctggcatgtcctcaaaaatgactcatgactgtggatatgaagaactattgacttcttaagaaaaaagggagaaatattaatcagaaagttgattcttatgataatatggaaaagttaaccattatagaaaagcaaagcttgagtttcctaaatgtaagcttttaaagtaatgaacattaaaaaaaaccattatttcactgccaaaaaaacaggtcgccgctgcgaagggagccgccgccatgtctgcgcatctgcaatggatggtcgtgcggaactgctccagtttcctgatcaagaggaataagcagacctacagcactgagcccaataacttgaaggcccgcaattccttccgctacaacggactgattcaccgcaagactgtgggcgtggagccggcagccgacggcaaaggtgtcgtggtggtcattaagcggagatccggccagcggaagcctgccacctcctatgtgcggaccaccatcaacaagaatgctcgcgccacgctcagcagcatcagacacatgatccgcaagaacaagtaccgccccgacctgcgcatgcttgcgggaagggttgggaggcagcaggctgtaagcagcctggagcaccagcctagaccaggatgcctccacctcagcaacaccgcagccaggtcattctgtgtcatggagccatctcgtacgctgcaggatttgggtagcacccttggcctccacccactagatgctagtggcacccccgagttgtgacaaccctttctggtctcctgacaatgcataataccccttggggggcaaaatcacctctggctgagaaacactggtttatgaaccctatcgctattaaaaaaccactgaactgtatactttggaactgagttttacggcatgtaagctcagctttagcaaaaaagcctctaatgagaccccatctctgcaaaccataaaaatataaaacct

SEQ ID NO: 24 - DNA, 895 bp, Homo sapiens
cacagccagagctggaggtgggtgcccggcacggaggggcctgcggaccaatggctctgccctgcaccttagggctcgggatgctgctggccctgccaggggccttgggctcgggtggcagcgcggaggacagcgtgggctccagctctgtcaccgttgtcctgctgctgctgctgctcctactgctggccactggcctagcactggcctggcgccgcctcagccgtgactcagggggctactaccacccggcccgcctaggtgccgcgctgtggggccgcacgcggcgcctgctctgggccagccccccaggtcgctggctgcaggcccgagctgagctggggtccacagacaatgaccttgagcgacaggaggatgagcaggacacagactatgaccacgtcgcggatggtggcctgcaggctgaccctggggaaggcgagcagcaatgtggagaggcgtccagcccagagcaggtccccgtgcgggctgaggaagccagagacagtgacacggagggcgacctggtcctcggctccccaggaccagcgagcgcaggggacagtgctgaggccctgctgagtgacctgcacgcctttgctggcagcgcagcctgtgatgacagcgccagggcagctgggggccagggcctccatgtcaccgcactgtagaggccggtcttggtgtcccatccctgtcacagccgctcactccccgtgcctctgcttcccaagatgccatggctggactggacccccagcccacatgaccatgcctcagactgtcaccccctaccagttcccaagtccatgtgtaccccgctcaccacgggaacggccccccccaaccacaggcatcaggcaaccatttgaaataaaactccttcagcctgtgc

SEQ ID NO: 25 - DNA, 927 bp, Homo sapiens
ctccgggtgacgcggctgcggtagctgcggatacaagccttccgcgggtcctgcctggcgaccccgacctcctcctgctgtctctccgctccgccaccccgaacccgccaaggtcctgtccttttcctcctgtcctttgccagcgttgggccggaccgggccgagccgggccgcccgggcgcagtctttaaccatggcgtccctcttcaagaagaaaaccgtggatgatgtaataaaggaacagaatcgagagttacgaggtacacagagggctataatcagagatcgagcagctttagagaaacaagaaaaacagctggaattagaaattaagaaaatggccaagattggtaataaggaagcttgcaaagttttagccaaacaacttgtgcatctacggaaacagaagacgagaacttttgctgtaagttcaaaagttacttctatgtctacacaaacaaaagtgatgaattcccaaatgaagatggctggagcaatgtctaccacagcaaaaacaatgcaggcagttaacaagaagatggatccacaaaagacattacaaacaatgcagaatttccagaaggaaaacatgaaaatggaaatgactgaagaaatgatcaatgatacacttgatgacatctttgacggttctgatgacgaagaagaaagccaggatattgtgaatcaagttcttgatgaaattggaattgaaatttctggaaagatggccaaagctccatcagctgctcgaagcttaccatctgcctctacttcaaaggctacaatctcagatgaagagattgaacggcaactcaaggctttaggagtagattagtcaaaagaagtcatactattttgcttacttataattatgtagtataaaccaagcacagtgcagatttcttttacaaaacacatgtattttgc

SEQ ID NO: 26 - DNA, 468 bp, Homo sapiens
cttcgatgtcggctcttcctatcattgtgaagcagaattcaccaagcgttggattgttcacccactaatagggaacgtgagctgggtttagaccgtcgtgagacaggttagttttaccctactgatgatgtgttgttgccatggtaatcctgctcagtacgagaggaaccgcaggttcagacatttggtgtatgtgcttggctgaggagccaatggggcgaagctatcatctgtgggattatgactgaacgcctctaagtcagaatcccgcccaggcggaacgatacggcagcgccgcggagcctcggttggcctcggatagccggtcccccgcctgtccccgccggcgggccgcccccccctccacgcgttccgcgcgcgcgggagggcgcgtgccccgccgcgcgccgggaccggggtccggtgcggagtgcccttcgtcctgggaaacggggcgcggccggaaag

SEQ ID NO: 27 - DNA, 488 bp, Homo sapiens
ggcttcctgaccttgggctacggctgaccgttttttgtggtgtactccgtgccatcatgtccgtcctgacgccgctgctgctgcggggcttgacaggctcggcccggcggctcccagtgccgcgcgccaagatccattcgttgccgccggaggggaagcttgggatcatggaattggccgttgggcttacctcctgcttcgtgaccttcctcctgccagcgggctggatcctgtcacacctggagacctacaggaggccagagtgaaggggtccgttctgtccctcacactgtgacctgaccagccccaccggcccatcctggtcatgttactgcatttgtggccggcctcccctggatcatgtcattcaattccagtcacctcttctgcaatcatgacctcttgatgtctccatggtgacctccttgggggtcactgaccctgcttggtggggtcccccttgtaacaataaaatctatttaaacttc

SEQ ID NO: 28 - DNA, 1502 bp, Homo sapiens
  misc_feature 758: n = a,c,t, or g
ggcggatcccccggcgtcagtagagacggggtttcaccgtgttggccagggtggtctcgatctcctgacctcgtgatctagccgcctcggcctcccaaagtgctgggattacaggcgtgagcaccgcgcccggcctcgcaggtctttttacattgagaaaactaaaatccagagatctgccgacaccccaggccatcgagccccaggccatcgtgcagcaggtcccagcccccagtcgaatgcagatgccgcagggaacccgctgctgctgtcccacaccctgcaggagctgctggccagggacaccgtgcaggtggagctcattccggagaagaagggcctcttcctgaagcatgtggagtatgaggtttccagccagcgcttcaagtcctcggtatacagacggtacaatgacttcgtggtcttccaggagatgctcctgcacaagttcccctaccgtatggtgcctgccctgccacccaagagaatgctgggagctgacagggagttcatcgaggccaggaggagagccctgaagcgcttcgtcaacctggtggcgcgacaccccctgttctccgaggatgtggtcctcaagctcttcctgtccttcagcggctcggatgtgcagaacaagttaaaggagtcagcacagtgcgtcggggacgaattcctgaactgtaagctggctaccagggccaaggacttcctcccagctgacatccaggctcagtttgccatcagccgggagctgatccggnacatctacaatagctttcacaagcttcgcgacagggccgagcggatcgcgtcgcgggccatcgacaatgcggcagatcttctcatattcgggaaggagctaagtgcaatagggtctgacacgaccccgctgccctcctgggccgctctgaatagcagcacgtgggggtccctgaagcaggctctgaaaggcctgtctgtggaattcgcgctgctcgccgacaaggctgcacaacagggtaagcaggaagagaacgacgtggtggagaagctgaacctcttcttggatctgctgcagtcctataaggacctgtgcgagcggcatgagaagggcgtgttgcacaagcaccagcgggccctgcacaagtacagcctgatgaagaggcagatgatgagcgccaccgcgcagaaccgcgagccggagtccgtggagcagctggagtcccgcatcgtggagcaggagaacgcgattcagacgatggagctgcggaactacttctccctgtactgcctgcaccaggagacgcagctcatccacgtctacctgcccctcacctcccacatcctccgcgccttcgtcaactctcagatccaagggcacaaggagatgagcaaggtgtggaacgacctgaggcccaagctcagctgcctctttgcgggaccacacagcaccctgaccccaccgtgctccccgccggaggacggcctgtgtcctcactagcgcctgaggctgaggtggtgctcct

SEQ ID NO: 29 - DNA, 503 bp, Homo sapiens
acattacattggccagaacttaacatgacaactactagctacaaggtggtttttattctgggttgccatgcatcttagcttaagtaccctacaggtcctgagataatgattcctatgaaaatgattatttacttatttaattaatttattttgagatggagtctcactctgtcacccaggctggagatcagtggcgtgatctcggctcactgcggcctctgcctcccgggttcaggcggttctcctgcttcagtctcccgagtggctgggactgcaggcatgcgccaccatgcccggcttttttgtatttttagtggagacggggtttcgctgtgttggccaggctgatctcgaactcctgacctcgggtgatctgcctgcctcggcctcccaaagtgctgggattacaggcgtgagccactgtgcctggctgaaaatgattttttaaaagtgttccaggaggaaatggaaagggcataggggagtaagaaagtggaaatagg

SEQ ID NO: 30 - DNA, 514 bp, Homo sapiens
gcatccggcttcatggggggacttgaaccctgcagcaggctcctgctcctgcctctcctgctggctgtaagtggtctccgtcctgtccaggcccaggcccagagcgattgcagttgctctacggtgagcccgggcgtgctggcagggatcgtgatgggagacctggtgctgacagtgctcattgccctggccgtgtacttcctgggccggctggtccctcgggggcgaggggctgcggaggcagcgacccggaaacagcgtatcactgagaccgagtcgccttatcaggagctccagggtcagaggtcggatgtctacagcgacctcaacacacagaggccgtattacaaatgagcccgaatcatgacagtcagcaacatgatacctggatccagccattcctgaagcccaccctgcacctcattccaactcctaccgcgatacagacccacagagtgccatccctgagagaccagaccgctccccaatactctcctaaaataaacatgaagct

SEQ ID NO: 31 - DNA, 581 bp, Homo sapiens
ggagctggtggtggaggtgatggtggaggtaatggaggtgatggtggtggtgaaggggatggtggtgatggaggtggtggtggtggaggtgacagtggtgatgctggtggtggaggtggtggaggtactggaggtcatggtggtggtggaggtgatagtggtgaaggtgatggaggtggtggaggttatggagataatggtggtggtggaggtgatagatatttgaacatgcctgacctaaagaaaagttcattttcatttttggctgggcactatggctgatgcctgtaaccccaactctttaggaagcctaggtggaagggtggcttgaacccaggaggtcagggctgcagtgagctatgactgtgccactgcactccaacccaggtgacggagcgagaccctgtctcttaaaatattttttttacagtgcattttcatgtgtttcaatctcctagtgtccctgccaaaaatattttaatctgaatcaaatcatggggaaattatgagacaaatcaggtcaaaagacagtttacaaaacagttggcctgaacttttcaaaactgtcaacatgttcaaag

SEQ ID NO: 32 - DNA, 550 bp, Homo sapiens
cagcgcagccattttggcttcctgaccttgggctacggctgaccgttttttgtggtgtactccgtgccatcatgtccgtcctgacgccgctgctgctgcggggcttgacaggctcggcccggcggctcccagtgccgcgcgccaagatccattcgttgccgccggaggggaagcttgggatcatggaattggccgttgggcttacctcctgcttcgtgaccttcctcctgccagcgggctggatcctgtcacacctggagacctacaggaggccagagtgaaggggtccgttctgtccctcacactgtgacctgaccagccccaccggcccatcctggtcatgttactgcatttgtggccggcctcccctggatcatgtcattcaattccagtcacctcttctgcaatcatgacctcttgatgtctccatggtgacctccttgggggtcactgaccctgcttggtggggtcccccttgtaacaataaaatctatttaaactttaaaaaaaaaaaaaaaaaaaaaaaaaaaaaaaaaaaaaaaaaaaaaag

SEQ ID NO: 33 - DNA, 1344 bp, Homo sapiens
tttttttttttttttttttttttttagcatttctttgaattttattgaaaattgacatggacattagaaaggtatcaggctaaacagtgctggttctgggatgtttctcctggagaatgaaagccccagaggggcaatgactggtcacacctttgagcaaaaagaacaaaggagaagaaaggaaaaacacacacagattctggaaaacatgcaaagaggctctctcaagagacactgaacagcagaatggtggtgatggtggtaggggatatatgagaatgagcacactcacatggtattttgatgcaagttaaaccaatgaattcaaggcagatttaccaacatcaaagctctccctccagatcccaggttgggcagaaacctctctcaaaaccctaactggtctcggaaggtggaatggagtaattttgccctcactaagcttaaaccccctcccttctctacctaagtgttagatagtggatacattttcccccagcaacaccaaggtggacaagacagttgagcgcaaatgttgtgtcgagtgcccaccgtgcccagcaccacctgtggcaggaccgtcagtcttcctcttccccccaaaacccaaggacaccctcatgatctcccggacccctgaggtcacgtgcgtggtggtggacgtgagccacgaagaccccgaggtccagttcaactggtacgtggacggcatggaggtgcataatgccaagacaaagccacgggaggagcagttcaacagcacgttccgtgtggtcagcgtcctcaccgtcgtgcaccaggactggctgaacggcaaggagtaaaagtgcaaggtctccaacaaaggcctcccagcccccatcgagaaaaccatctccaaaaccaaagggcagccccgagaaccacaggtgtacaccctgcccccatcccgggaggagatgaccaagaaccaggtcagcctgacctgcctggtcaaaggcttctaccccagcgacatcgccgtggagtgggagagcaatgggcagccggagaacaactacaagaccacacctcccatgctggactccgacggctccttcttcctctacagcaagctcaccgtggacaagagcaggtggcagcaggggaacgtcttctcatgctccgtgatgcatgaggctctgcacaaccactacacacagaagagcctctccctgtctccgggtaaatgagtgccacggccagcaagcccccgctccccaggctctcggggtcgcgcgaggatgcttggcacgtaccccgtgtacatacttcccgggcacccagcatggaaataaagcacccagcgcttccctgggcccctgc

SEQ ID NO: 34 - DNA, 496 bp, Homo sapiens
tttttttttttttttttggatttacaacaagtttttttaataagaaatgggcaaagccagctttcttttcagaatcaaaatgcagaacaaatggaaaaattatggtattaaccttcacaagtttgagcctccacaaataatgcaaccaagttttacatttttaacagcccttctacatacactccatcttctctatcttagttccaagttttagttttcaatcccaattataccaattccattgttattttaagaaaaaaccttcccagttattgtcagaaactatgatttagcttaccccctccactacccagcaaactacagagaggatggagtgtaatatgagcagtacagagtcttaatgcaattcatgaggaccacttagtccttacatgaatctggttgctaacatttctattatattgtgacaatgactcccgactgttattctctgtgagaaatggggggagtaaattcttaataaaagacttagaaa

SEQ ID NO: 35 - DNA, 478 bp, Homo sapiens
tagagcttcagacgccctatggcgtccgcctcgacccaaccggcggccttgagcgctgagcaagcaaaggtggtcctcgcggaggtgatccaggcgttctccgccccggagaatgcagtgcgcatggacgaggctcgggataacgcctgcaacgacatgggtaagatgctgcaattcgtgctgcccgtggccacgcagatccagcaggaggttatcaaagcctatggcttcagctgcgacggggaaggtgtccttaagtttgctcgcttggtcaagtcctacgaagcccaggatcctgagatcgccagcctgtcaggcaagctgaaggcgctgtttctgccgcccatgaccctgccaccccatgggcctgctgctggtggcagcgtggccgcctcctgagagttggccctcccttgtgccactgccaggggaggaaaggccttgatgttccagacaataataaatgcgcctgtgactg

SEQ ID NO: 36 - DNA, 811 bp, Homo sapiens
  misc_feature 725: n = a,c,t, or g
ttttctgggaaagtgaggccaccatggctctggagaagtctcttgtccggctccttctgcttgtcctgatactgctggtgctgggctgggtccagccttccctgggcaaggaatcccgggccaagaaattccagcggcagcatatggactcagacagttcccccagcagcagctccacctactgtaaccaaatgatgaggcgccggaatatgacacaggggcggtgcaaaccagtgaacacctttgtgcacgagcccctggtagatgtccagaatgtctgtttccaggaaaaggtcacctgcaagaacgggcagggcaactgctacaagagcaactccagcatgcacatcacagactgccgcctgacaaacggctccaggtaccccaactgtgcataccggaccagcccgaagagagacacatcattgtggcctgtgaagggagcccatatgtgccagtccactttgatgcttctgtggaggactctacctaaggtcagagcagcgagataccccacctccctcaacctcatcctctccacagctgcctcttccctcttccttccctgctgtgaaagaagtaactacagttagggctcctattcaacacacacatgcttccctttcctgagtcccatccctgcgtgattttgggggtgaagagtgggttgtgaggtgggccccatgttaacccctccactctttctttcaataaaacgcggttgnccccccaaaaaaaaaaaaaaaaaaaaaaaaaaaaaaaaaaaaaaaaaaaaaaaaaaaaaaaaaaaaaaaaaaaaaaaaaaaaaaag

SEQ ID NO: 37 - DNA, 409 bp, Homo sapiens
cttgcccgcacactcgggccccactcaaggatgtagggccttttctggcccctgacccctccctggcatgggagcgtggggacggggctggccttgggaggagcggcaggggcatcacctccttctgctgcttctccctgctcctaccctcaagggcctgggggctgcccagctgcctctatgcccttctgggggtctcagcccactgctgacacttctgcaatccagagaaacactaaataaagcaatacgtgtttgccaaaaaaaaaaaaaaaaaaaaaaaaaaaaaaaaaaaaaaaaaaaaaaaaaaaaaaaaaaaaaaaaaaaaaaaaaaaaaaaaaaaaaaaaaaaaaaaaaaaaaaaaaaaaaaaaaaaaaaaaaaaaaaaaaaaaaaaaaaaaaaaaaaagt

SEQ ID NO: 38 - DNA, 670 bp, Homo sapiens
aaaaagtaaaagaatgaggtagaccttaataataacctctgtttgttccttatttttagatgggtcatatttctctatgatcgtatttgtttaaaaattattctgatttttcagcctgcaggtcaggagtcatcttttcccccttctggtcagtatccttatcctagtggctttcctccaatgggaggaggtgcctacccacaagtgccaagtagtggctacccaggagctggaggctaccctgcgcctggaggttatccagccctggaggctatcctggtgccccacagccagggggagctccatcctatcccggaggtgagttacgggttgcggaattagtaatgattgggattgctgtagcactttttccttctccctttatcctcttcattcctgcttgttttgtataaggtcaagtcgctcttaggtaaccttaggtagtaaggacctagctggcaagatggagggatgaagattctctggggacatgaaagctgggagcagtttcaaaaattccactgtgaagggacttggaataaatttcatggcaataaaggaccaatatgtaacactttgcttgtttgtagtcttaagacctgattaagacatttcaattagcaagactgtgacctttaggtcagctttattcaaaggtaaaaaagacccc

SEQ ID NO: 39 - DNA, 1095 bp, Homo sapiens
ggggaacacaggtctgcagcaacttctccttgccctctacatatttgtaaagtgcctctcctgtgccaggcactgttctgggctctggggatgtgtaatgaacttctggatagatttccccagtagaggagaaacacctgctttcaaatccacaaaggaagtgttgagttgttgcccggctgtgattggtggaaggcatctcttgggcagtgaagctgagacctcaggctgtggccgtggcatccacgctccaggaggatggaagatgcaactcgtattccagacctgttcccatctccccttctgattctcttttctcccagggaagttagttgtgggttgatttcatttatgttttccaaaccattcacttactgagtcctgcctgagtgccagacactgtgccgacagcttaccctgaataagctaatagacgatgatcctaatgctccccatgcgacgggttgtggatccccgatgctgtggatcgggaagctgaggcttaggggtcccctgtggaaggagccggaacctgaccttggctctgtacctcggcaccccagagcccccctgcctgccctgaggagctcttataaaaagttttaaaattaatttttaattacatgaatattgcaggaggatattctctctataaaaaattaagacattacagtgaaggctaaagccccctgtggtccttctaatctcagtagagaggtcctggtagaaagcacagttttctagctggtgtgtccatccagacatttaaaaaatatgtacatatttatacatgtctgtatctatggaaaatatatggtgccattttgtgtctgggtattttcattctatttttagaaaatacaaatgggaacattctgcagcttttctactcagcagtgtttcttttctttcctctgtttttttagaaggaataaatatttaataaaatatcactggaaataaaccactgaagcagaagtcttctagcattttgtttttacaggactttttgacgaaatcgcttaaagcaatatattttttttttcaaaagactggaaatccttttttaaaaaaagaaaaaaaacaacgtttttt

SEQ ID NO: 40 - DNA, 847 bp, Homo sapiens
gccgcttttttttttttttttttttttttttttttgctgtcttccatctttctcgctcgaatttctctcattaaatcaaaaaataccttgtcaacattagctcgtgttttagcagatgtttccacgtagttaacattccactgctcagctctgttttttgcctcttctacagaaacctgtcttttatcttctaaatctgatttgttaccaaccagtagaaatggaacattctcatcttcttttactcttaaaatctgctccctgaagtcagctgtagctgcaaaggattccatttctgtaatagagaaaacacagaggaacccctccccacttcggaagtagttgtctctaattgcagcgtagtcctcctgcccagctgtatctaagatatcgatctggacttcctccccatctagcactaccttcttccgatagctgtctgctttggtaggctcatagtcctccacaaactcatcgtacatgaactgtagagtcagagctgacttgcccacgccaccactgcccaccatgatgactttgtgtaaagccaaagaattctgacccttgggcttatttgcagccattttgtgtctcagttttcaccaaaggattaagaagaatctgcaccgcgagccagtccgccgccccgagggctccggaagccgcggctgcgtggctccggccggagggtactcggtccttgtcgcctggaaggccccgcgccgggagcggtcgaaggaggagtctgacgggtggcgggggagcctgggcggctggaggaggaggaggaggaggaggagaaggaggaggaggactccgacgctttgctctggggagatcttagaaa

SEQ ID NO: 41 - DNA, 764 bp, Homo sapiens
atcactagtggagtttcttacctacatttaagtatcctcactagccttcataaaataatcatcaacatcaaagatacctgtttctgttctctcttaccctgtccacagaacttttgcgactttcaggaccagtcatgcagcagtcccagcagccccagcctctacagaagcagccaccacagccccagcagcagcagagaccccagcagcagcagccacatcaccctcagacagagtctgtcaactcttattctgcttctggatccaccaatccatacatgagacggccgctttgcttttttttttttttttttttttttttttttggtcagggtctctctctgtcacccaggctggagtgcagtggcacaatcatggctcactgcagcctcgactttccgggctccagcaatcctccaacctcagcctcctgagtagctgggactacaggtgcctgccaccatgcccggctaagttttgtatttttggtagagatggggttttaccatgctgcccagagtggtctcaaactcctaagctcaagtgatccacccaccttggcctcccaaagtgctgggatcacaggcatgagccaccgaacctggctattattatcttaaaaaaaaacaacagtttattataaatgttttaagcaatcaatacatcactaggtttaacaattactagcattcttcatgccaaagatcttaaaggacatcctagacttcgtggcaaactatataaggcaagtaacaccttagaaa

SEQ ID NO: 42 - DNA, 788 bp, Homo sapiens
tttctttttattattttataatttttgaaatagagatggggtctcactgtgttgcccaggctggtctcggactcctggacttaagtgagcctcccgcctcagtctcccaaagcgctgggattacaggcgggagccactgagcccagccaagacttcagtgttgactgctttggaggcacaaacccatgcaagcgttagttccaaagttcagtgtgtacccttaaatgaacaatgaagcaggtaaaattacccttgaaaaaaatcccttggaccacccataaatgacagtgactttttcaatatggactcatcatagccagttttccttttgaagttggaactgatcacccttttgtcatctgtaccagatcagtagttggcttgtgttacattttgtgtgtgtgtgtgcgtgttttaaaccagtgcatataaattgtatgttaaatgtaagtaactttaagttgacttatctcttcacagtaatcaagcctcacgtaattcatgctttttaaattcagccagccccccctctctgaaattttattatgtaaataatttgtgttccctgatcactcgtttaagttcttagttgtatgtcatctcttctctagcaggaattggcaaacttttttgtaaaggggtagaaagtgaagattttaggctttgcaggccatatagcctctgctgcaaatgctcagccctgctgttgtaatgtaaaagctgccacagacactacatgaacacgaatgagtgtggctggtgttccaataaaactttatttaccccca

SEQ ID NO: 43 - DNA, 575 bp, Homo sapiens
tttttttttttttttttttttattttttttttttggaggggctctctgtatcctttatctccggcagggtcagcggccctccagggcccggtctcgagcgatgactgcctcctcgaacttgatcatgagcgtggtgcccttgtgccagtgcgccgtgaccttggcagggaagccgctgtgtgtgagcaccgcctccacgatgcccgccgtgaagctggcgcagttgagcgtgctgttctccttgggcacggagatgtaggtgttgatgagcggctcgcgctcgatgatgtagaaggtgcgcgcgtcatcgttggcctgctccagcttgtccgcctccttgccgaagagcgccttccacacggcgcccttgacgaagagcaacgcgcctagcgccttggtctcacgccgggcacccttttcgcgcgccaccagcgcatccagcacgcgcgcgcccacctggcggcccagcgcggccaggcgcgactgcagctcggccacggagaagacgcggctctggcagtgctgtaccagctcggagaacagcagtgcgaaggcgctcaggctcacctcggtgc

SEQ ID NO: 44 - DNA, 1290 bp, Homo sapiens
caccaaatggcggatgacgccggtgcagcgggggggcccgggggccctggtggccctgggatggggaaccgcggtggcttccgcggaggtttcggcagtggcatccggggccggggtcgcggccgtggacggggccggggccgaggccgcggagctcgcggaggcaaggccgaggataaggagtggatgcccgtcaccaagttgggccgcttggtcaaggacatgaagatcaagtccctggaggagatctatctcttctccctgcccattaaggaatcagagatcattgatttcttcctgggggcctctctcaaggatgaggttttgaagattatgccagtgcagaagcagacccgtgccggccagcgcaccaggttcaaggcatttgttgctatcggggactacaatggccacgtcggtctgggtgttaagtgctccaaggaggtggccaccgccatccgtggggccatcatcctggccaagctctccatcgtccccgtgcgcagaggctactgggggaacaagatcggcaagccccacactgtcccttgcaaggtgacaggccgctgcggctctgtgctggtacgcctcatccctgcacccaggggcactggcatcgtctccgcacctgtgcctaagaagctgctcatgatggctggtatcgatgactgctacacctcagcccggggctgcactgccaccctgggcaacttcgccaaggccacctttgatgccatttctaagacctacagctacctgacccccgacctctggaaggagactgtattcaccaagtctccctatcaggagttcactgaccacctcgtcaagacccacaccagagtctccgtgcagcggactcaggctccagctgtggctacaacatagggtttttatacaagaaaaataaagtgaattaagcgcgaaaaaaaaaaaaaaaaaaaaaaaaaaaaaagcgaagatgcaaagaggttggatcaagtttaaatgactgtgctgcccctttcacatcaaagaactactgacaacgaaggccgcgcctgcctttcccatctgtctatctatctggctggcagggaaggaaagaacttgcatgttggtgaaggaagaagtggggtggaagaagtggggtgggacgacagtgaaatctagagtaaaaccaagctggcccaaggtgtcctgcaggctgtaatgcagtttaatcagagtgccatttttttttttgttcaaatgattttaattattggaatgcacaatttttttaatatgcaaataaaaagtttaaaaacc

SEQ ID NO: 45 - DNA, 814 bp, Homo sapiens
aggaggcccaggcccaaaaggacaaggacaaggaggctggcgagaagccatcaggtggagccccggctgcggatggcgagcaggacgagaggagccccagccgttctgaaggcgaggctgagagcgagagcagcgactccgagtccctggacatggcccccagcgacacggagcggactgaggggagtgagcgttctctgcaccaaacaacagttattaaggccccggtcactggcgccctcattaccgccagcagtgctgggagtggtgggagcagcggcggcggcggcaatagtttcagcttcagcagcgccagcagtcttagtagcagcagcaccagtgcgggttgcgccagcagccttggcggcggcggcgcctcggagcttctccctgcaacacagcccacagccagcagcgctcccaaaagccccgagccagcccaaggcgcgcttggctgcttatagactgtactagggcggaggggatccgggccttgcgtgcagcctcccaaccatgggctgggttttgtgcttactgtatgttggcgacttggtagggcaggagacgcagcgtggagcctacctcccgacattcacgcttcgccccacgctgctccgactggctgcagcggacactgcccaaagcagaggggagtctcagtgtcctgctagccagccgaacacttctctccggaagcaggctggttcgactgtgaggtgtttgactaaactgtttctctgactcgccccagaggtcgtggctcaaaggcacttaggacgccttaaatttgtaaataaaatgtttactacggttg

SEQ ID NO: 46 - DNA, 959 bp, Homo sapiens
ggacgatggggatgagaaagaagatgacgaggaggataaagatgacgtccctgggccctcaactgggggcagcctccgagaccctgagccagagcaggctgggcccagctctggagtcacgaacaggtgcccgttcctcctggacaattgccttggcacatctcagtggcccccaaggcgacgacgcaagcagctgttcaccctgcagacggtgaactccaatgggaccagcgaccgcacaacctcccctgaagaagtccatgcccagccgtacattgctatcgactgggagccagagatgaagaagcgttactatgacgaggtagaggctgagggctacgtgaagcatgactgcgtcgggtacgtgatgaagaaggctcccgtgcggctgcaggagtgcattgagctcttcaccactgtggagaccctggagaaggaaaacccctggtactgcccttcctgcaagcagcaccagctggcaaccaagaagctggacctgtggatgctgccggagattctcatcatccacctgaaacgcttttcctacaccaagttctcccgagagaagctggacaccctcgtggagtttcctatccgggacctggacttctctgagtttgtcatccagccacagaatgagtcgaatccggagctgtacaaatatgacctcatcgcggtttccaaccattatgggggcatgcgtgatggacactacacaacatttgcctgcaacaaggacagcggccagtggcactactttgatgacaacagcgtctcccctgtcaatgagaatcagatcgagtccaaggcagcctatgtcctcttctaccaacgccaggacgtggcgcgacgcctgctgtccccggccggctcatctggcgccccagcctcccctgcctgcagctccccacccagctctgagttcatggatgttaattgagagccctgggtcctgccac

SEQ ID NO: 47 - DNA, 1174 bp, Homo sapiens
  misc_feature 1038,1080,1100: n = a,c,t, or g
cttttttttttttttttttttttttttttttctatgcagtccttgtttcctgccatttaattttagatgaaaatgagacatatgagtacactgaaaagtaacatcaccatctggaaaattatacataaggaaaatgcaataagggaatatagatccttcagcccctattccagtactctttaacaactctgcttccttggacgggaattcatgaggtataatacttaaggagattttcatctgtaggttttaggattttcttatcggccatattcaccacccatcctggagcaagaccaaagaaaatctgccttggatccttcctagtacagagcattttgaagagttcatctttagtgatatcaggtaagatataaccatacttcctggcgagttcaagtcgtgcttcaggaaatttggcaggatccgccaggtacccacggttctttgcatcagtgtaatatggtaccagttcttctggtggaagcattctttttggaatgggttgtccacgaagaaagaatggaacaggtttgcatacaatgtccagacttcttggatcatagaaggctgtagtaacaacaccaccatttttttcaatggcagcaatagctagttctgaagccaactgtacttcaatattaacttttgccgtaaaggtgtcagcaccctcctcaaccagctggacaccataatcccttttaagtggctggatggtcacacctctcccattgacaagctgggttaagtcaataggttgactaggatcaacacgacccaaatcaataagatactgcagtctattgagactcaaaggcttatactggcgtctgaaactatgtccttcgttaaacccgtattttgggattcggatgtaaaatggagtctggcctccctcaaagcccaagcggggccgggttcctctttgcctttctcctttatggcctctgccacattttctacctcttctccgacctcttggtcttctctccggtttcttggagccgggattcggctttaagttggccaggctcacangcggcaggccccggagtaggtccagggcccgggccccaccgncctgcaagggaccggccatnacccgcagatccaagaactttcaagggcgccctgagctgctcggaggccacgtggtctcggggaaccttagaaa

SEQ ID NO: 48 - DNA, 1157 bp, Homo sapiens
ggccggatggggagccgcttggtgggcatcatctcctccagggacattgattttctcaaagaggaggaacatgactgtttcttggaagagataatgacaaagagggaagacttggtggtagcccctgcaggcatcacactgaaggaggcaaatgaaattctgcagcgcagcaagaagggaaagttgcccattgtaaatgaagatgatgagcttgtggccatcattgcccggacagacctgaagaagaatcgggactacccactagcctccaaagatgccaagaaacagctgctgtgtggggcagccattggcactcatgaggatgacaagtataggctggacttgctcgcccaggctggtgtggatgtagtggttttggactcttcccagggaaattccatcttccagatcaatatgatcaagtacatcaaagacaaataccctaatctccaagtcattggaggcaatgtggtcactgctgcccaggccaagaacctcattgatgcaggtgtggatgccctgcgggtgggcatgggaagtggctccatctgcattacgcaggaagtgctggcctgtgggcggccccaagcaacagcagtgtacaaggtgtcagagtatgcacggcgctttggtgttccggtcattgctgatggaggaatccaaaatgtgggtcatattgcgaaagccttggcccttggggcctccacagtcatgatgggctctctcctggctgccaccactgaggcccctggtgaatacttcttttccgatgggatccggctaaagaaatatcgcggtatgggttctctcgatgccatggacaagcacctcagcagccagaacagatatttcagtgaagctgacaaaatcaaagtggcccagggagtgtctggtgctgtgcaggacaaagggtcaatccacaaatttgtcccttacctgattgctggcatccaacactcatgccaggacattggtgccaagagcttgacccaagtccgagccatgatgtactctggggagcttaagtttgagaagagaacgtcctcagcccaggtggaaggtggcgtccatagcctccattcgtatgagaagcggcttttctgaaaagggatccagcacacctcctcggtttttttttcaataaaagtttagaaagg

SEQ ID NO: 49 - DNA, 2193 bp, Homo sapiens
  misc_feature 2029,2053,2120: n = a,c,t, or g
tttttttttttttttttttttctgatcagactctttttattgttttgttttttataaacaagtctcaggtggaaaaagaaagaaagggaggagctagctctctgccttctcagccaattgaaatcgtggaaaccaatgggcttcagctagccccactcatcactgctgggggggaaaagacatccctactccccttccccgtggcactcatgatattctcaatgccccaacaagggtcatcttggttcctctcggcgtttctgtcctggcctttggctctggctccggctctgactccggctccggccagggccccgggagcccctagagctgctggagcccctggaagagttgctgccggccgtggaacaggtgctggtgccctggccccgggacaggaagcttggtctgctgtatgggagccaggcctcttcatctgggtggagcacccgctgggctgccaggggcacggcctggaccgctttcctctccccactgcgctcccgctccagggaggacatgctgcctgctgccctcagctctagggcccagctcgcctcttcctctggcggtggcaagggtggtgggggcaagtccccaggactgttctccctcctgtagggaagagccttgggtttcttccggaatcgagcacggggtccttgaagtgggggagtcatctccccattcccctgccaggttctgcctggggcactgctggctgtgctaggggcaggactggggctgaggtggggtgaggctgcagggccagcacccaagccagcaggcctcgcttcacggatgcccagcatgggctgggatacactgagaggggaactcggcccaaggggcaccctcctgcaatgacaggaggccgcagcctctgttccctccacaaaaactgaatgcctactatgtgcctggcactgtgctagacaatcaacctaacagataaacgagacacaacccgtccgcccgtaagtcctcccaagctagagaagcataaggagagccatatctgaaatgtctcaggtagagtgctgaccactccagcaagagccagtctaatgggcatgagagatcttgtcagcctccatattcctgcccaaattacacttccaccctgacacaagcctgagacctctgtaccccagatccatccacccatccatccatccacccacccagtcatctactgagtagataccgtatagagggctttgcaatgaagtgaggtactatatacctcccctacctgggcatcttgatggagatggggcatgtcagttgggggctggggaggggtcaagaaggtgaagggtgtaaagagtggcttgtggactgctgtccataagaaaggtgtgggagaggggggttttcccttcgggatggggtgaccaggcaccctccactggagctgggctccgtcaggtgacttctctcaggcatttggcgggcaccactcctctggctctgagctgccctccagctcctcctccggcccttctaggcagctcagttcacaagaagtaggaggtgggggcagggcttctggccagttcagagagggcatctgcacaggtttccccagaagcttcactttgcctcccttggctcctgaggagaataggatggggacacccggagaacaggcaggaaagagccagagatgagacaggtcagaaggaagtgccgggctaggtgccagagggtcagggaggaggatcctctttggggataccctggtcagggctaaacggggtttcaggagttggagtcataccactgtccccctggctccactctggaggagcgtactggctccagggaccctgttctcctgagggatgttgggggaagcccccatggaaggtctgcagctcctcccccgctgggtcaatggtgctatagacaggaccctcgccaggggcggccgtgcccctggccgtctgagctagatacagggagattcctgcttctgcagtgaagaaagagggaggcccggaagcagagacagaaacatagaggncaacagaatggaagacaaaggganatcccacgggatcaacttcttcccccacacaagccttacatcctaaaacagggtggaggtaggtctnagaggcttccccagctcacatcctccccagggactgaccaacctcagagagaccgggctcccgggcgccttcg

SEQ ID NO: 50 - DNA, 651 bp, Homo sapiens
attattcatcacatacacaaaaagaagtgttcaccctcctgacgcagggcttgtcgtgcgcctggggcgcggccgtggctctgggcacgctctgcctgtgccgtcgccgcctgctggacggcccacggggctgggatgccagcccgggccctcggctgttggctgtggcgggcgcgctggggctgctggctagcggcttgcagctggcggctgcgctctggctgtacccgggcccaggccgcgtgggccgcttctcgtgggcctggtggggtgtccacttctggctgcgcctcctggagctgacatgggcgctcgccctggcgttggccgcggtggctgccgcgagacccaggccgcccacggagcacgcttgctgggctaagctgatgcgtctggcgtgcccggcgccgtcagaaagagcgaggtgccggagcgacccaataactgctatgcagggcccagcaacgttggtgcaggcagcttggacatcagcaagagcctcatccgcaacccggcggagagtgggcagctggccacgcccagttcaggcgcctggggctcggctgcgtcgttgggtcgcggaccccagggtggcccgggactgtcccgcaacggtgtgggaccggcgccatcgctgagcgagctggatct

SEQ ID NO: 51 - DNA, 1204 bp, Homo sapiens
cagcctctttctttctccctgtctcccccactgtcagcacctcttctgtgtggtgagtggaccgcttaccccactaggtgaagatgtcagcccaggagagctgcctcagcctcatcaagtacttcctcttcgttttcaacctcttcttcttcgtcctcggcagcctgatcttctgcttcggcatctggatcctcattgacaagaccagcttcgtgtcctttgtgggcttggccttcgtgcctctgcagatctggtccaaagtcctggccatctcaggaatcttcaccatgggcatcgccctcctgggttgtgtgggggccctcaaggagctccgctgcctcctgggcctgtattttgggatgctgctgctcctgtttgccacacagatcaccctgggaatcctcatctccactcagcgggcccagctggagcgaagcttgcgggacgtcgtagagaaaaccatccaaaagtacggcaccaaccccgaggagaccgcggccgaggagagctgggactatgtgcagttccagctgcgctgctgcggctggcactacccgcaggactggttccaagtcctcatcctgagaggtaacgggtcggaggcgcaccgcgtgccctgctcctgctacaacttgtcggcgaccaacgactccacaatcctagataaggtgatcttgccccagctcagcaggcttggacacctggcgcggtccagacacaagtgcagacatctgcgctgtccctgcagagagccacatctaccgcgagggctgcgcgcagggcctccagaagtggctgcacaacaaccttatttccatagtgggcatttgcctgggcgtcggcctactcgagctcgggttcatgacgctctcgatattcctgtgcagaaacctggaccacgtctacaaccggctcgctcgataccgttaggccccgccctccccaaagtcccgccccgcccccgtcacgtgcgctgggcacttccctgctgcctgtaaatatttgtttaatccccagttcgcctggagccctccgccttcacattcccctggggacccacgtggctgcgtgcccctgctgctgtcacctctcccacgggacctggggctttcgtccacagcttcctgtccccatctgtcggcctaccaccacccacaagattatttttcacccaaacctcaaataaatcccctgcgtttttggg

SEQ ID NO: 52 - DNA, 1541 bp, Homo sapiens
ccgcttttttttttttttttttttttttttttttagaggacaatggatttgtttttattaatttttttgctaagaaagtttctaggtggcaggtgctgtccggggagggggcgtgcgcagcagacacagcagccaaactgtcctttctgcttccgtctgtctgtgccagccctgccgcctgccagctcttgctccctcagagccagaaggttcttggctccaggcttcctggcctggatgctggcagcccctggggagaggacccaggccccctctagtaatggccaccaccctccccccagggcagctggagcctcatctttggcagggtcccctctcccttttccaggagactctgtgcctgtagccctggtcccagtgaacctggcccccaccccagtggctggaacaggaaggccaggaggcagatgggccagggccaggagacagatggcccaatcccctgcccaccacagcagcttttctgagaggcgggcaggggcagggtttgctccccctggtgctgggatgtggtagagacattgcagccagggctggaggcagggaggcgggagtagagatgtcgctgctgagcccccatcaccatgggaggcaggggaggtctgcactctgggcactccgcatgctggggctccccaagtgttaggccaggctggagggccgcgatgtggcggggaagccccagaccctacaggaaagcccttgcaagtccccaccggggacccagccccaccgcaaacctctacggctacggtgccggccgcaaggcatgctgggaggcctgcttggcccggtgccgccgcagcctcacaaagacctgggcttctcggtcacccttccggccctccagcagctgcaggattgggtccccgttgggtgcggggtacgtgaggggcaggcgggtctgaggcacctcaccaggctcctcagagccactcagcccgggcacctcacgcagcggcaggaaggcctcgccttccaggtcgtcggcccccagcgtgtcgtagtccagcacggtgagcaggaggcatgccccagccttgcggcacggctcagcaggcaccaggaattcaaaggtctcatcaaacaatgggtgaaggtccttcttgtgcttctgggtctcccgggcggccagctcagggaactcatgcctgggctccaaggtcagctggacaaaggggtcgctggagccattggagtccaggggcagcaggctggaggcgctgagcagctccacacgcagcttctgctcagaggcgcggtaggaggccttgactgtcacagcccccagctcctcagaggtggtttctgcctgctgctggattcggctgcagaagtacttccggatgagttcccggctggaggccgcctgcagctccaggtccctctgcagagcctggaaggtggcagtgtgcagggccttgggtggcaggccacagccctcagcgtggaagcagatctccaggttctgcagggcaatcttcagcctgttggaagccagggatgagctgcgctgggag

SEQ ID NO: 53 - DNA, 2384 bp, Homo sapiens
ccacccttcccgatgcagtccctgatgcaggctcccctcctgatcgccctgggcttgcttctcgcggcccctgcgcaagcccacctgaaaaagccatcccagctcagtagcttttcctgggataactgtgatgaagggaaggaccctgcggtgatcagaagcctgactctggagcctgaccccatcgtcgttcctggaaatgtgaccctcagtgtcgtgggcagcaccagtgtccccctgagttctcctctgaaggtggatttagttttggagaaggaggtggctggcctctggatcaagatcccatgcacagactacattggcagctgtacctttgaacacttctgtgatgtgcttgacatgttaattcctactggggagccctgcccagagcccctgcgtacctatgggcttccttgccactgtcccttcaaagaaggaacctactcactgcccaagagcgaattcgttgtgcctgacctggagctgcccagttggctcaccaccgggaactaccgcatagagagcgtcctgagcagcagtgggaagcgtctgggctgcatcaagatcgctgcctctctaaagggcatataacatggcatctgccacagcagaatggagcggtgtgaggaaggtcccttttcctctgttttgtgtttgccaaggccaaactcccactctctgcccccctttaatcccctttctacagtgagtccactaccctcactgaaaatcattttgtaccacttacattttaggctggggcaagcagccctgacctaagggagaatgagttggacagttcttgatagcccagggcgtctgctgggctgaccacgttactcatccccgttaacattctctctaaagagcctcgttcatttccaaagcagttaaggaatgggaaccagagtgttttaggacctgaagaatctttatgactctctctctttcactctttttttttttgtcactaagttaaaagcgaagtgagagtattaacgtttttgttctcctccggccccctgttacaatgaaggggcaaaagtatttgctcttagtctattcctcccttaacttctgtgactaatttttatttcctttctagatttgcccaattaatactagggtgcagtgtatcctggagaggtagggtgtgtgggggaggaatcccttgggggagatattaggagtgctctgttgtttacaaactcaggtacccgcagggcctagcaagagacttaaatgactgataaagaacccgtgagaaacatgttgcttcaggcttgatttcgatttttcgctttttttttttttgagacggaatctcactttgtcaccaggctggagtgcagtggtgcaatctcacctcactgcaacctccgcctcctgggttcaagcaattctcctgcctcagcctcccaagtagcttggactacaggccctgccaccacgcccggctaatttgtgtatttttagtagagatggggtttcaccatgttggccaggatggtctcgatctcttgacctcgtgatccgtccaccttggccttgcaaagcgctggattacaggcatgagccactacacccagccgatttttcctttttgattaaagatgctattacaatgtaaatatttcttacacagaaagtcacagcacatgtgcccattgatacaaggctgctgaggcctggtctccagttggaaatataattaagggtggcagggactggagtcagttggagagtgcatagccagtctgtgaagacaactgccagatactggcaatactccagcctggtgacagagtgagactctgtctcaaaaaaaaaagtttcaatgtttactcctagagaagccaaaaatcccagatttgtatatgaaatcttaccattttaaaagattggcagctaattatttttttaaaaagctgtgcagtgtgatgtgtcccaaacggactggctcatgggtggccacgtcacaacctctgatctcagaccgtgcatgccttgtcctcttaagacaactcctgtggccccgtttctccctccccagggccaaagccatagtgtccggtcccaaggccaaggcacttccagtgctaggagaggtatgagcagcctctcacctgtgagctgtggggatcacaaggctgcctgcctcagtcttggggtcctgttgggtgaatgaggcagatgggaaagagcctcaccagcagctgcttttggagcaggggtccaaggaagagggggtggcctcgccatcaatctgccaggatttttctaccaccctgttacatcataacaacttctgaaacacacacaccgccctgagttctgggctcatttgaagcctggaatggcaataaatctttttaacttgc

SEQ ID NO: 54 - DNA, 1254 bp, Homo sapiens
gaccgcaacccttgccgctgccgctgacatcgctaccatggtctccggcagcagcggcctcgccgccgcccgtctcctgtcgcgcagcttcctcctgccgcagaatggaattcggcattgttcctacacagcttctcggcaacatctctatgttgataaaaatacaaagattatttgccagggtttcactggcaaacagggcacctttcacagccagcaggcattggaatatggcaccaaactcgttggaggaaccactccagggaaaggaggccagacacatctgggcttacctgtctttaatactgtgaaggaggccaaagaacagacaggagcaacggcttctgtcatttatgttcctccgccttttgctgctgctgccattaatgaagctattgaggcagaaattcccttggttgtgtgtatcactgaaggaattccccagcaggacatggtacgatcaagcacaaactgctgcgccaggaaaagacaaggctaattgggcccaactgccctggagtcatcaatcctggagaatgtaaaattggcatcatgcctggccatattcacaaaaaaggaaggattggcattgtgtccagatctggcaccctgacttatgaagcagttcaccaaacaacgcaagttggattggggcagtctttgtgcgttggcattggaggtgatccttttaatggaacagattttattgactgcctcgaaatctttttgaacgattctgccacagaaggcatcatattgattggtgaaattggtggtaatgcagaagagaatgctgcagaatttttgaagcaacataattcaggtccaaattccaagcctgtagtgtccttcattgctggtttaactgctcctcctgggagaagaatgggtcatgccggggcaattattgctggaggaaaaggtggagctaaagagaagatctctgcccttcagagtgcaggagttgtggtcagtatgtctcctgcacagctgggaaccacgatctacaaggaatttgaaaagaggaagatgctatgaaagaaaaaaaaaattcctaaaactgtggaatggatcacgtagacatgtaacccagcagcagtttgcttctgttgtccactgattaatcagcctatgtgcctgacactggtcttgcagtacaactggaagccaaaacaaggtggaagatgtcctgaattaagacgttttcaccacattgtattacagagacagccaataaatctactatttgatttc

SEQ ID NO: 55 - DNA, 1127 bp, Homo sapiens
atcttggaagcacaggcgctgacagccgtcccagcccttctgtctgcgggcctgaaccaaacggtgccatggggaactgtctgcacagggcggagctctccccctcaactgagaactcaagtcagctggacttcgaagatgtatggaattcttcctatggtgtgaatgattccttcccagatggagactatgatgccaacctggaagcagctgccccctgccactcctgtaacctgctggatgactctgcactgcccttcttcatcctcaccagtgtcctgggtatcctagctagcagcactgtcctcttcatgcttttcagacctctcttccgctggcagctctgccctggctggcctgtcctggcacagctggctgtgggcagtgccctcttcagcattgtggtgcccgtcttggccccagggctaggtagcactcgcagctctgccctgtgtagcctgggctactgtgtctggtatggctcagcctttgcccaggctttgctgctagggtgccatgcctccctgggccacagactgggtgcaggccaggtctcaggcctcaccctggggctcactgtgggaatttggggagtggctgccctactgacactgcctgtcaccctggccagtggtgcttctggtggactctgcaccctgatatacagcacggagctgaaggctttgcaggccacacacactgtagcctgtcttgccatctttgtcttgttgccattgggtttgtttggagccaaggggctgaagaaggcattgggtatggggccaggcccctggatgaatatcctgtgggcctggtttattttctggtggcctcatggggtggttctaggactggatttcctggtgaggtccaagctgttgctgttgtcaacatgtctggcccagcaggctctggacctgctgctgaacctggcagaagccctggcaattttgcactgtgtgctacgcccctgctcctcgccctattctgccaccaggccacccgcacccttttgccctctctgcccctccctgaaggatggtcttctcatctggacacccttggaagcaaatcctagttctcttcccacctgtcaacctgaattaaagtctacactgcctttgtgg

SEQ ID NO: 56 - DNA, 968 bp, Homo sapiens
acacacgagcatatttcacctccgctaccataatcatcgctatccccaccggcgtcaaagtatttagctgactcgccacactccacggaagcaatatgaaatgatctgctgcagtgctctgagccctaggattcatctttcttttcaccgtaggtggcctgactggcattgtattagcaaactcatcactagacatcgtactacacgacacgtactacgttgtagcccacttccactatgtcctatcaataggagctgtatttgccatcataggaggcttcattcactgatttcccctattctcaggctacaccctagaccaaacctacgccaaaatccatttcactatcatattcatcggcgtaaatctaactttcttcccacaacactttctcggcctatccggaatgccccgacgttactcggactaccccgatgcatacaccacatgaaacatcctatcatctgtaggctcattcatttctctaacagcagtaatattaataggagctgtatttgccatcataggaggcttcattcactgatttcccctattctcaggctacaccctagaccaaacctacgccaaaatccatttcactatcatattcatcggcgtaaatctaactttcttcccacaacactttctcggcctatccggaatgccccgacgttactcggactaccccgatgcatacaccacatgaaacatcctatcatctgtaggctcattcatttctctaacagcagtaatattaataattttcatgatttgagaagccttcgcttcgaagcgaaaagtcctaatagtagaagaaccctccataaacctggagtgactatatggatgccccccaccctaccacacattcgaagaacccgtatacataaaatctagacaaaaaaggaaggaatcgaaccccccaaagctggtttcaagccaaccccatggcctccatgactttttc

SEQ ID NO: 57 - DNA, 1002 bp, Homo sapiens
ttctccccagcaatacctctatgtggctgacctggcacggaaggacaagcgtgttctgcggaaaaagtaccagatctacttctggaacattgccaccattgctgtcttctatgcccttcctgtggtgcagctggtgatcacctaccagacggtggtgaatgtcacagggaatcaggacatctgctactacaacttcctctgcgcccacccactgggcaatctcagcgccttcaacaacatcctcagcaacctggggtacatcctgctggggctgcttttcctgctcatcatcctgcaacgggagatcaaccacaaccgggccctgctgcgcaatgacctctgtgccctggaatgtgggatccccaaacactttgggcttttctacgccatgggcacagccctgatgatggaggggctgctcagtgcttgctatcatgtgtgccccaactataccaatttccagtttggtgagtggggcgtccttcttttctggctcaacctacagcagggacctgcctgagtccttcactatccccaagtcacccacagggatcgctaagacacccctgtaggaaactccaaggctggcgtgcctgggtgtgcacacatcctagcctatggaacatgggcacctagatgctgcttcattcatctgtcaagctattcctatgtaaaggcatgtgccgcagtgaagaaaacagtataattaagaaggggtccctggccgggtgcagtggctcacgcctgttatcccagcactttgggaggccgaggcagatggatcacgaggtcaggagctccagaccatcctggctaacatggtgaaaccccgtctctactaaaaatacaaaaaattagccgggcacagtggcaggcgcctgtagtcccagctgctcgggaggctgaggcaggagaatggcatgaatccgggaggcagagtttgcaatgagccaagatcacgccctgcgctccagcctgggcaacagagcgagactccgtctc

SEQ ID NO: 58 - DNA, 691 bp, Homo sapiens
cccagagaatgggctttgcatggagcttggctcctgtccctgcctgtgagggaggaccagactcggcctcaccacctgccactctgagcaaacaggcaacggtgtttcctgaacatctttctgaagcggctgagggatgtcagctgagcccccgctgggcctgctctggagcgggatgtctccagaagccgcccttggagcgggcacttccctatttgggcgtgtcccagtcccatgcctcaccatccccttgcttgaagctccaagagcatgagagtgggcagcctggtctgctgaggaaagtgtctgatggatgcggaaatggccaccccaaacaccggtaagcagatgttaccctgcaggcggtggctcctggggcccagccctgcagaaacacatggggcaggctgggcagaggggctcacacccgataatcccagcactttgggaggctgaggtgggaggatcgcttgagcccaggagtttgagaccagcctgggcaacatagcaagactctatctccactaaaaatcaaaacaaaacaattagctgggtatggtggcacacgcctgtggttccagctactggggaggctgagggggaggatcacttgagcccaggagttcaaggctgcagtgagccatgattgcgccactgcactccagcctgggcaacagagcaagcttagaaa

SEQ ID NO: 59 - DNA, 943 bp, Homo sapiens
ggagggggtgggcccgtccctgaggtatgaaagccccctgctctggctctggttcagtctcaatgggggcactggggctggagggcaggggtgggaggctccaggggaggggttccctcctgctagctgtggcaggagccacttctctggtgaccttgttgctggcggtgcctatcactgtcctggctgtgctggccttagtgccccaggatcagggaggactggtaacggagacggccgaccccggggcacaggcccagcaaggactggggtttcagaagctgccagaggaggagccagaaacagatctcagccccgggctcccagctgcccacctcataggcgctccgctgaaggggcaggggctaggctgggagacgacgaaggaacaggcgtttctgacgagcgggacgcagttctcggacgccgaggggctggcgctcccgcaggacggcctctattacctctactgtctcgtcggctaccggggccgggcgccccctggcggcggggacccccagggccgctcggtcacgctgcgcagctctctgtaccgggcggggggcgcctacgggccgggcactcccgagctgctgctcgagggcgccgagacggtgactccagtgctggacccggccaggagacaagggtacgggcctctctggtacacgagcgtggggttcggcggcctggtgcagctccggaggggcgagagggtgtacgtcaacatcagtcaccccgatatggtggacttcgcgagagggaagaccttctttggggccgtgatggtggggtgagggaatatgagtgcgtggtgcgagtgcgtgaatattgggggcccggacgcccaggaccccatggcagtgggaaaaatctaggagactgtttggaaattgattttgaacctgatgaaaataaagaatggaaagcttcagtgctgccc

SEQ ID NO: 60 - DNA, 2399 bp, Homo sapiens
attttcaacattagtagaatattgtatagtaattgattaatgcattatactgatcggtttgctgcattagtacaaccttttaagggaaaattctggcgtttccctctggctggctcagcttctgcaacctcagcccttacaattgcagtgcttctggccatggcttgcttgttaactttcttgttcttgactttatccttatcctggcacacaaattccagtgtccttccacatgctcatcttagttttcacagtttcagttaccagctgatctgagaagtgcctatcagccttgatgaccttgactcaaaagggaccctgttgtcatcaaggagtttgtaattaggcagcagattgtatgtcttcacaaaattgttgcctattttttagccagcattttatcttgactccttaactacctaggcctatatccttctcctcctcctccgtcccctcttcctcctcctcctccgtcccctcttcctcctcctcctcatcatcttaccatttaatcaataattgcaatcagcctgtcagaatacgtaaagggaatccatgtaattcacaggcgggagttgttatttctgtagtaaagacctgactgcagcatttacacatgataaataggaaatggcaaacctggggaagcaagtttgaactcaatctggaagtaatagcctaagcagcttgctcttcacactgtgtttcccatgtcacccttttcctcttaggtatcttgcttctccctctcatttcaatctcctccttccttctgttcctccatccttccatccctccctcctgtctttctctgacacaatgactcagctagtttaagagaatggtattattttgaagtctgaaaatgtttctgtgatattttgctttttactgatctttaaagcaactcacagaagtgtattagccttagatacgtaatcaccccttgagatatatagtcaacagtacacaccgacatgttcatagtaaaaactgcctttatgtttcactgcattcaagcaagtagatatttgtttgtttcacgtattgcaaagcctatgttcttaagcatgtaccaaaatcacatttatttcattaatccatttactcattcaccagaatgtaacaaaatttagtgaatatctgctatgtgtcaggcacttttcttggctcttgatatacaatgatattcaaataaaactcatagtctggtaggggaggtaggagacaaatatgtactgatgttaatagatattcctgaaataaataaaggaattaggatggttaggaacatccttccagaagaaatgcaaggctggccatgaaaggtgactatatcgtaataggcagaaggtggcagcgcaggtatgggtcgtaagaagaaccttataggaaaggaggtcaacttgccccagtgccatgagctcagcactacaacctggtgcaggacttcgaagtaatagaaagcgaggctgcaaaggtggacagggacctgaagacagagggccaggttagtgagagcagaccttaccacgggcatagcttagcagttttaagaataggatcagattttcatttgataaaatcaccctgatgacaaggtggagagtggattagatgtgggtaacatcgaagataaagaagcaggtacagagactcataaaatatgcagatgagaggtagtggagaccagaatcaaaactgtgaggaataggaatgtttaaatatgtcccaagttacaattcagttacatatttcatcagccagcatgtcctgtgcacacacgacctgctcttactgctttccatgttctgtatgtggaaggagatcagtcaatcttgaactcatggcctcagtattttgtactttataatttatattttttcctatagaggcttttctatttatgtgtattccacttccccatatcactaaactgtctttttccacaggattcaattcttgaactagtaggagtgaagggcagtctgttgaaacctgtaatctcttaggcttgtattttctttgaacatagtttccacagaattcttccctgtaggggaaggcctgggcacttcttgatgtcagaacatgttgtctttagtttggaatctgccaaaacaaaagttaaatcaaaaatgttaattcctgtcaccccggcacttcgggaggccaaagcaggaggattgcttgagcccaggagtccgagactggcctgggtaacatagcgagacctcgtctctacattaaaatttaaaaattagctggatgtgctggcatgcgctcatagtcccagctgctcgggaggctgaggcgggaggattgcttgagtctgggaggtcgaggctgcagtgagccactgcactccagcgagtgatggagtgagaccctgtctcagg

SEQ ID NO: 61 - DNA, 1516 bp, Homo sapiens
ggcttcgagtgacccgggtgccgaggagcgggaagagttgctggggcccactgctcagtggagcgtggaggacgaggaggaggccgtccacgagcaatgccagcatgagagagacaggcagcttcaggcccaggacgaggagggaggcggccatgtccccgagcggccgaagcaggagatgctcctcagcctgaagccctcggaggcccctgaactggatgaggacgagggctttggcgactggtcccagaggccagagcagcggcagcagcacgagggggcgcagggcgccttggacagcggagagcccccccagtgcaggagtcctgagggggagcaagaggacaggcccggcctgcatgcctacgaaaaggaggacagtgatgaagtccacctggaggagttgagtctgagcaaggaggggccaggcccagaggacactgtccaggacaacctgggggccgcaggggctgaggaggaacaggaggagcaccagaaatgtcagcagcccaggacacccagccccttggtcttggaggggaccatcgaacagagctcgcctcccctgagccctaccaccaaactcatcgacaggaccgagtccctaaaccgctccatagagaagagtaacagtgtgaagaaatcccagccagacttgcccatctccaagattgatcagtggctggaacaatacacccaggccatcgagaccgctggccggacccccaagctagcccgccaggcctccatagagctgcccagcatggctgtggccagtaccaagagtcggtgggagacgggtgaggtacaggctcagtctgcggccaagactccgtcctgcaaggatattgtggctggagacatgagcaagaaaagcctctgggagcagaagggaggctccaagacctcatcaacaattaagagcaccccatctgggaagaggtataagtttgtggccaccgggcatgggaagtatgagaaggtgcttgtggaagggggcccggctccctaggcgtcccatctcgcttcctgggtctgcaggtccagccggctggcaccctccatgtacccaggggagattccagccagacacccgccccccggccctggctaagaagttgcttcctgttgccagcatgacctaccctcgcctctttgatgccatccgctgccacctccttttgctcctggaccctttagcctctctgcccttccactctctgaccaccgccaccgccctccccacccagctccgcttcttgttacttgggggaggaaagaaactcctgatcattggccaaagggacttacccctggagaggccaagtgccttctaggaagttaggaggttgaggcacagcctgtgcagagagggtgggtcacccccccagatccaaggggaaactgcaggtcaagggctgataacggccatgcaggatgcttgatgctgcgtcccccgctgcttgccgccccccaccccgccattttgtataataaagctccctgtgtattctcc

SEQ ID NO: 62 - DNA, 933 bp, Homo sapiens
ctctagcagtgggtgaaggcctgtgagtgaggaatgcctctcaccagctgtgcctgagctgcagcactccagccactgctgtctccttagctgctcacatatggatactttcacagttcaggattccactgcaatgagctggtggaggaataatttctggatcatcttagctgtggtcatcatcgttgtctctgtgggtctgggcctcatcctgtactgtgtctgtaagtggcagcttagacgaggcaagaaatgggaaattgccaagcccctgaaacacaagcaagtagatgaagaaaagatgtatgagaatgttcttaatgagtcgccagttcaattaccgcctctgccaccgaggaattggccttctctagaagactcttccccacaggaagccccaagtcagccgcccgctacatactcactggtaaataaagttaaaaataagaagactgtttccatcccaagctacattgagcctgaagatgactatgacgatgttgaaatccctgcaaatactgaaaaagcatcattttgaaacagccatttcttctttttggcaaaactgaagagggttcacacaacttattttaaaacaatcaagaatggttgaacttcagtaggtctctgggccctgaaagccagtggtgattttatgaagctctataagataaagcacttcccaaaccttagatgaagacacccctgcgatcggatgactgcagccagaggagacacatgggtgctcggctctgaggacttagaggggtcagccttgtgctgttgaggaaactttccatgggaaggaccacggggctccatggctcccacctgtgggaaactactcatttcttggcattctttcccccttcattccctttggtttgcatggttctgagtgatattaaatctcagcatttggttgtgccgccc

SEQ ID NO: 63 - DNA, 1232 bp, Homo sapiens
cccagagaggctcagctgcactcgcccggctgggagagctgggtgtggggaacatggccgggcctccgaggctcctgctgctgcccctgcttctggcgctggctcgcggcctgcctggggccctggctgcccaagaggtgcagcagtctccccactgcacgactgtccccgtgggagcctccgtcaacatcacctgctccaccagcgggggcctgcgtgggatctacctgaggcagctcgggccacagccccaagacatcatttactacgaggacggggtggtgcccactacggacagacggttccggggccgcatcgacttctcagggtcccaggacaacctgactatcaccatgcaccgcctgcagctgtcggacactggcacctacacctgccaggccatcacggaggtcaatgtctacggctccggcaccctggtcctggtgacagaggaacagtcccaaggatggcacagatgctcggacgccccaccaagggcctctgccctccctgccccaccgacaggctccgccctccctgacccgcagacagcctctgccctccctgacccgccagcagcctctgccctccctgcggccctggcggtgatctccttcctcctcgggctgggcctgggggtggcgtgtgtgctggcgaggacacagataaagaaactgtgctcgtggcgggataagaattcggcggcatgtgtggtgtacgaggacatgtcgcacagccgctgcaacacgctgtcctcccccaaccagtaccagtgacccagtgggcccctgcacgtcccgcctgtggtccccccagcaccttccctgccccaccatgccccccaccctgccacacccctcaccctgctgtcctcccacggctgcagcagagtttgaagggcccagccgtgcccagctccaagcagacacacaggcagtggccaggccccacggtgcttctcagtggacaatgatgcctcctccgggaagccttccctgcccagcccacgccgccaccgggaggaagcctgactgtcctttggctgcatctcccgaccatggccaaggagggcttttctgtgggatgggcctgggcacgcggccctctcctgtcagtgccggcccacccaccagcaggcccccaacccccaggcagcccggcagaggacgggaggagaccagtcccccacccagccgtaccagaaataaaggcttctgtgcttcctttttttt

SEQ ID NO: 64 - DNA, 1207 bp, Homo sapiens
attcaccaactggacaaggctttggcaaagctggggattggccagctgactgctcaggaagtaaaatcggcttgttatctccgtggcctgaattctacgcatattggtgaagataggtgtcgaacttggctgggagaatggctgcagatttcctgcagcctgaaagaagctgagctgtctctcttgctgcacaacgtggtcctgctctccaccaactaccttgggacaaggcgctgaatgaaccatggagcggatggcattgtcctgcagtcgtatagtatagcagtgcaggaacaaacagcacttgccagcaaagtctgtgtgtactgttaagtgtgtgggaggcagagagaggagcaggggccatgggcttcacagcatggcacacatgtgggaactgcagacattcctctcacagctagaactgaaacaaaccctcttgctaggggtggtccgtgtgaggtgtcatcctgtccccctcataattactaatagctggaactggcagcagcctctactgggcttttactgtgatgtgttcaagtcatgtcctaggagtcagcttttgccagggggatcttatttggtaggactgtcacttcatgtactacatctgtggttttgtgtgctgtagaaattgtgctgtgaacacactctttgctgagcacatgtgtccgtgcatgtacttgggtgtttccctccatcctttctgatatgaccaaaaatcaagttgttttgttttttgtcaccttcactggcatgggctaaccacttctttttcaaaccctctgaacacctttttctgatgggtaacttgcaggaatattctattggaaaagataacaggaagtacaagtgcttcttgaccccttcctcaatgtttctagccttcactctccattgtcttttctgggctgtattacagccctctgtggatcttcaactctgctgcctccactgtgatgcagcagtccaactgtaactgacagtggctgccttctctgggccatggatcacacctgtaaggtactaattactgcccagcctggggagatcaggagaggtctgcatagttagtaagttgggtttagcttttgtgtgtgcatcagtgacttagagttctgtaataacttattgtaaatgcatgaagcactgtttttaaacccaagtaaagactgcttgaaacctgttgatggaaatgactaag

SEQ ID NO: 65 - DNA, 1279 bp, Homo sapiens
tctgaagagtgcagctgcctgaaccgagccctgccgaacagctgagaattgcactgcaaccatgagtgagaacaataagaattccttggagagcagcctacggcaactaaaatgccatttcacctggaacttgatggagggagaaaactccttggatgattttgaagacaaagtattttaccggactgagtttcagaatcgtgaattcaaagccacaatgtgcaacctactggcctatctaaagcacctcaaagggcaaaacgaggcagccctggaatgcttacgtaaagctgaagagttaatccagcaagagcatgctgaccaggcagaaatcagaagtctggtcacctggggaaactatgcctgggtctactatcacatgggccgactctcagacgttcagatttatgtagacaaggtgaaacatgtctgtgagaagttttccagtccctatagaattgagagtccagagcttgactgtgaggaagggtggacacggttaaagtgtggaggaaccaaaatgaaagagcgaaggtgtgctttgagaaggctctggaaaagaagccaaagaacccagaattcacctctggactggcaatagcaagctaccgtctggacaactggccaccatctcagaacgccattgaccctctgaggcaagccattcggctgaatcctgacaaccagtaccttaaagtcctcctggctctgaagcttcataagatgcgtgaagaaggtgaagaggaaggtgaaggagagaagttagttgaagaagccttggagaaagccccaggtgtaacagatgtacttcgcagtgcagccaagttttatcgaagaaaagatgagccagacaaagcgattgaactgcttaaaaaggctttagaatacataccaaacaatgcctacctgcattgccaaattgggtgctgctatagggcaaaagtcttccaagtaatgaatctaagagagaatggaatgtatgggaaaagaaagttactggaactaataggacacgctgtggctcatctgaagaaagctgatgaggccaatgataatctcttccgtgtctgttccattcttgccagcctccatgctctagcagatcagtatgaagaagcagagtattacttccaaaaggaattcagtaaagagcttactcctgtagcgaaacaactgctccatctgcggtatggcaactttcagctgtaccaaatgaagtgtgaagacaaggccatccaccactttatagagggtgtaaaaataaaccagaaatcaaggg

SEQ ID NO: 66 - DNA, 938 bp, Homo sapiens
atccagcatctcagcagaaaactgcctgacatgaaaagtcccctgaggaactgcatctgcgtttcaggggcttttcattttttctccttttttaaagtgtagattgtgggtgcttcctagaggcctgccttcttctggaactggaagtgggctatcaccatgggcaagcccttgggtgcaggctccccacctgcctgggaactctggcagctctcctcagctccttgggcttgagcagctgcaactgccccagatttgctgtggaagcaggggctagccctggcctcaccagggcctcccggggccctgcattgatgctcaggagttcctgggctgctcttgatcctttctgggcatccagcttccagttaagctctgtttgccaaacaaactattctcagctgccctttggcctgcgcctgatgtgttcctgttgcagtcccgcctgcctgagacaggagcaggcaggagagccttcatgcccagattcccacagagacaattggggagctgctggcattgtctttctgggaagattctgctttcttggaccaaatggcagcctgattaccagtgtcgggcctgcatgctgcccccgacacacgcacgcacgcgcacacacgtgtgcacatgggccatagccacaagccagctctcctccagggtcctttcaacctcgctgtccagggaccctgtccttcttgcccgtggggcttccatctggcagagaacgttcagggcttgttgaacttgaaagctcattagacttaagctgtcacctgtgcttggtgccccaggaacagccagagaggacagtgccccaggaacagccagagaggacagtgcccactcacttcttgttggcagcctcctgtgcaggaagtgccagccgggcctcgacgcaccagctggctgtgggtcctgaggaggggcgggag

SEQ ID NO: 67 - DNA, 1369 bp, Homo sapiens
gagcccttgtcagatgtgacagccaccctcctctttgacttcctggaggtgtgtgggaatgccctcatgaagcaataccaggttcagttctggaagatgctaattctcatcaaagaggactactttcccagaattgaagctatcacaagctcaggacagatgggctccttcatacgcctcaagcagttcttggagaaatgtttgcaacacaaggacattcctgtccccaagggctttctgacttcctccttctggcgctcctgatgtcactccatcacccaccatcaccgctgctgcaaagaggcaataataaaggaactgaagacagctgtatttgggagaagtcatgtcagattcagaaatttgccattatgtatttttatgtatttatgccttgtgactaggagaggagattttcatgggtcacaaaattcttggaggtcccttagtagatttggtagttccttaagagatccacgtgataaaataaatggagttggctttcttgttttttgcaaaagtgataaaaggtctttagcacttggtctcctcccttgtctctagtgtctttcagaaagttggcaataccttaacaaatgcactctgagctggagggagcccaccatttgcacccacctacccaccctcacccctgttcagatgaatttccagaaagagctaaggctcataaggttcccttttaagtattatttaatagttgaggccagatacttacatgcaagtctgggttatggttgttttgcctttctcagcttgtgaagtcattctaaagctagaggaagtatgtgatatacacatggactaaggctcaggtgacactatggctagattaacatctgggattaggactggaaacacatgtcattttgaactaagggaaactctttgtcatcctaatttggaatttggtccctggatgatccatgaaccaggcaggtaccttttttgtttttgttttgttttgtttcttttctgtttgaattaagatgggctaagatggggcttgcaacattaaacatgagctgagcatccataagcattgaattgggattaaataaagatgttgggcaggaactgaacactgctaatatgatgataaatatgcctgactaaagccactacagaaatccagagattggctgttaaaatttgttttgtggaaagactaattctctttgatactgcagaggcagtggccatggatctgttcctctgtgctaaatgtcttgtggcagggtgtgtttgtgggggagtgttcactggtactcttgagtggcctgaagtgacccattctatgaattgttaattaaggtgccaaaaaaaattaataataaagcttggtttttcg

SEQ ID NO: 68 - DNA, 857 bp, Homo sapiens
ggatgctgcgcctctccgaacgcaacatgaaggtgctccttgccgccgccctcatcgcggggtccgtcttcttcctgctgctgccgggaccttctgcggccgatgagaagaagaaggggcccaaagtcaccgtcaaggtgtattttgacctacgaattggagatgaagatgtaggccgggtgatctttggtctcttcggaaagactgttccaaaaacagtggataattttgtggccttagctacaggagagaaaggatttggctacaaaaacagcaaattccatcgtgtaatcaaggacttcatgatccagggcggagacttcaccaggggagatggcacaggaggaaagagcatctacggtgagcgcttccccgatgagaacttcaaactgaagcactacgggcctggctgggtgagcatggccaacgcaggcaaagacaccaacggctcccagttcttcatcacgacagtcaagacagcctggctagatggcaagcatgtggtgtttggcaaagttctagagggcatggaggtggtgcggaaggtggagagcaccaagacagacagccgggataaacccctgaaggatgtgatcatcgcagactgcggcaagatcgaggtggagaagccctttgccatcgccaaggagtagggcacagggacatctttctttgagtgaccgtctgtgcaggccctgtagtccgccacagggctctgagctgcactggccccggtgctggcatctggtggagcggacccactcccctcacattccacaggcccatggactcacttttgtaacagactcctaccaacactgaccaataaaaaaaaatgggggttttttttttttttt

SEQ ID NO: 69 - DNA, 824 bp, Homo sapiens
ggatgctgcgcctctccgaacgcaacatgaaggtgctccttgccgccgccctcatcgcggggtccgtcttcttcctgctgctgccgggaccttctgcggccgatgagaagaagaaggggcccaaagtcaccgtcaaggtgtattttgacctacgaattggagatgaagatgtaggccgggtgatctttggtctcttcggaaagactgttccaaaaacagtggataattttgtggccttagctacaggagagaaaggatttggctacaaaaacagcaaattccatcgtgtaatcaaggacttcatgatccagggcggagacttcaccaggggagatggcacaggaggaaagagcatctacggtgagcgcttccccgatgagaacttcaaactgaagcactacgggcctggctgggtgagcatggccaacgcaggcaaagacaccaacggctcccagttcttcatcacgacagtcaagacagcctggctagatggcaagcatgtggtgtttggcaaagttctagagggcatggaggtggtgcggaaggtggagagcaccaagacagacagccgggataaacccctgaaggatgtgatcatcgcagactgcggcaagatcgaggtggagaagccctttgccatcgccaaggagtagggcacagggacatctttctttgagtgaccgtctgtgcaggccctgtagtccgccacagggctctgagctgcactggccccggtgctggcatctggtggagcggacccactcccctcacattccacaggcccatggactcacttttgtaacaaactcctaccaacactgacc

SEQ ID NO: 70 - DNA, 928 bp, Homo sapiens
gtctgccctccgatacccgcctggtcctcctcaatgctatctacctgagtgccaagtggaagacaacatttgatcccaagaaaaccagaatggaaccctttcacttcaaaaactcagttataaaagtgcccatgatgaatagcaagaagtaccctgtggcccatttcattgaccaaactttgaaagccaaggtggggcagctgcagctctcccacaatctgagtttggtgatcctggtaccccagaacctgaaacatcgtcttgaagacatggaacaggctctcagcccttctgttttcaaggccatcatggagaaactggagatgtccaagttccagcccactctcctaacactaccccgcatcaaagtgacgaccagccaggatatgctctcaatcatggagaaattggaattcttcgatttttcttatgaccttaacctgtgtgggctgacagaggacccagatcttcaggtttctgcgatgcagcaccagacagtgctggaactgacagagactggggtggaggcggctgcagcctccgccatctttgtggcccgcaccctgctggtttttgaagtgcagcagcccttcctcttcatgctctgggaccagcagcacaagttccctgtcttcatggggcgagtatatgaccccagggcctgagacctgcaggatcaggttagggcgagcgctacctctccagcctcatctctcagttgcagccctgctgctgcctgcctggacttggcccctgccacctcctgcctcaggtgtccgctatccaccaaaagggctccctgagggtttgggcaagggacctgcttttattagcccttctccatggccctgccatgctctccaaaccactttttgcagctttctctagttcaagttcaccagactctataaataaaacctgccagccc

SEQ ID NO: 71 - DNA, 672 bp, Homo sapiens
caccaccaccaaaaaaaaaaaaagccctcagaaaatttctcacaaataaggcaactaatgcctgatatctcaaaatcctttacaaaaggagatagttctagtcaaggagttttgggtatgttacttttttttcttctttttcttttcatctgcctccatcttaagtgcaatttcttcagctgtaagagctcccagtttcttattctttgctttcttaaccttttccttgatgctggccacatcaattttagtttcagtagaagctagacaaattaaaagcacaacacatgtaatactttagattttaccaagtaaaacaaagaatatatgtttaacaaagaatatatgtttaaggcagttaacttcagagtattcttataattgaataattgaaaggtgatcacagtataaaatataaaaacacttgcctaaagcagttagaaatttcttcagattaagataaaacaaatcataaaatactttatatattagtacaagtatacataaaaatggcataaatggcataattgaaccaattactggattcaactatattaagactatttccttaaatcctacttcagactaaattattttacctacattcttttccatattttggaacttctgagtcattattttccatcttgcacattaaaataatttaaaatt

SEQ ID NO: 72 - DNA, 518 bp, Homo sapiens
gtccacgctcggagccatgccgtccaagggcccgctgcagtctgtgcaggtcttcggacgcaagaagacagcgacagctgtggcgcactgcaaacgcggcaatggtctcatcaaggtgaacgggcggcccctggagatgattgagccgcgcacgctacagtacaagctgctggagccagttctgcttctcggcaaggagcgatttgctggtgtagacatccgtgtccgtgtaaagggtggtggtcacgtggcccagatttatgctatccgtcagtccatctccaaagccctggtggcctattaccagaaatatgtggatgaggcttccaagaaggagatcaaagacatcctcatccagtatgaccggaccctgctggtagctgaccctcgtcgctgcgagtccaaaaagtttggaggccctggtgcccgcgctcgctaccagaaatcctaccgataagcccatcgtgactcaaaactcacttgtataataaacagtttttgagggattttaaagttcc

SEQ ID NO: 73 - DNA, 1519 bp, Homo sapiens
  misc_feature 1483: n = a,c,t, or g
aagaagattatcaggctctgcgaacatcaatagatgcttatgacaactttgacaatatctcgcttgctcagcgtttggaaaaacatgaactcattgagttcaggagaattgctgcttatctcttcaaaggcaacaatcgctggaaacagagtgtagagctgtgcaagaaagacagcctttacaaggatgcaatgcagtatgcttctgaatctaaagatactgaattggctgaagaactcctgcagtggtttttgcaggaagaaaaaagagagtgctttggagcttgtctgtttacctgttacgatcttttaaggccagatgtcgtcctagaaactgcatggaggcacaatatcatggattttgccatgccctatttcatccaggtcatgaaggagtacttgacaaaggtggataaattagatgcttcagaatcactgagaaaagaagaagaacaagctacagagacacaacccattgtttatggtcagccccagttgatgctgacagcaggacccagtgttgccgtccctccccaggcaccttttggttatggttataccgcaccaccgtatggacagccacagcctggctttgggtacagcatgtgagatgaagcgctgatcctgtagtcacctattttcgtactgaaacatcgtctttacccacttctcagtttataatgggggaaacaggcaacgtgttcttgtaacctttatttcatgaaggacttctttttgtttctaactataaacttggatcacctatgttaaaaccttatttcacattccacatcattttagaattaattttcgaaggggaatagtttcaatgttttattcacttgggctttttttcttccccctctttctttaaagaactgctcaatattcaatctgttgtgaagaacctgatttgcactctgtagtgtttaaagaaacaaagaaactctaatattgaatctcttaaatttagtgtatgtaaacagcttacaaatacgtattgtctaaatgcatttaaatctgttttattcaaagaaaagctaaagcaaaaacactggcatatgaccatgcaagactgtcagtgccaacaaagacaacactaatcagcacatcgtacactggattgcagtgcttcccagattattgaaaaatgttacagacaacttgcctgtatttttaaatgagcgtaaaaggccctctaacctatgcaggtttccccattatgcatatagaaaatgctagtatgttttgctcacttcatatgtaacaggtgcccttatgttgtgctgtatcctgtgtctttttctgtgggaccattccattcaggagcaaagagcaccatgattccaatcttgtgtgtgtttactaacccttccctgaggtttgtgtatgttggatattgtggtgttttagatcactgagtgtacagaagagagaaattcaaacaaaatattgctgttcttcagttttgtttgtggaatttnaaattactcaaatttaaaataaattactggactgtg

SEQ ID NO: 74 - DNA, 760 bp, Homo sapiens
agcatgggtgctgggccctccttgctgctcgccgccctcctgctgcttctctccggcgacggcgccgtgcgctgcgacacacctgccaactgcacctatcttgacctgctgggcacctgggtcttccaggtgggctccagcggttcccagcgcgatgtcaactgctcggttatgggaccacaagaaaaaaaagtagtggtgtaccttcagaagctggatacagcatatgatgaccttggcaattctggccatttcaccatcatttacaaccaaggctttgagattgtgttgaatgactacaagtggtttgccttttttaaggatgtcactgattttatcagtcatttgttcatgcagctgggaactgtggggatatatgatttgccacatctgaggaacaaactggttattaaatagagcatctgttgagggactcttttaaaaccacagccatgaacagacgttggggctaagagacagagcagcctgcgacagtgtggacctacctgtagcagctagcaaaggcctctagcagctacagtcccttctggagtctttatttgcatgcaaaatgcaaaggagtcctggtgacctacctccaaggcagctgccctcctgaacactcccttggaaaacagtaaacatcattttggaatgtgaacaaccagagactacacaggagaaaggaaaaaaaaattctgaagatgcaaaatcttgggtggcttcaccgttcagttttttaataaaaggaacaatatac

SEQ ID NO: 75 - DNA, 344 bp, Homo sapiens
ctgaaacaagctaacatgactaacacccttaattccatccaccctcctctccctaggaggcctgcccccgctaaccggctttttgcccaaatgggccattatcgaagaattcacaaaaaacaatagcctcatcatccccaccatcatagccaccatcaccctccttaacctctacttctacctacgcctaatctactccacctcaatcacactactccccatatctaacaacgtaaaaataaaatgacagtttgaacatacaaaacccaccccattcctccccacactcatcgcccttaccacgctactcctacctatctccccttttatactaataatcttac

SEQ ID NO: 76 - DNA, 3684 bp, Homo sapiens
cagttcttggaggagactctgcacagggcatggatcactgtggtgcccttttcctgtgcctgtgccttctgactttgcagaatgcaacaacagagacatgggaagaactcctgagctacatggagaatatgcaggtgtccaggggccggagctcagttttttcctctcgtcaactccaccagctggagcagatgctactgaacaccagcttcccaggctacaacctgaccttgcagacacccaccatccagtctctggccttcaagctgagctgtgacttctctggcctctcgctgaccagtgccactctgaagcgggtgccccaggcaggaggtcagcatgcccggggtcagcacgccatgcagttccccgccgagctgacccgggacgcctgcaagacccgccccagggagctgcggctcatctgtatctacttctccaacacccactttttcaaggatgaaaacaactcatctctgctgaataactacgtcctgggggcccagctgagtcatgggcacgtgaacaacctcagggatcctgtgaacatcagcttctggcacaaccaaagcctggtactgctgggggcgcccccgtttccactgcacccctgcccctctgtgactctcctgttgaacactggtttgactagacccaaacctgtggaaccatcttggaaatccatcacactttgaaaattcctgctcaagaaataagagagagagaagtttttactcatgcatttgtcagaattctttcagttgcaaatgactaaactgaggctcagagcaacttggtgtcttgcctgggtcactctgagagcccacagtggaggtgggacaggaatctgagactgtctgaagccaaaggccagccagtgcctggtaaaatgttggcaaatgtgcagttgagtcaccgttggcccccaggactcccagacactgatctgcagcctttcctctgcaccctatgactgacccagcatctccacccaggaaggctacaccctgacctgtgtcttctggaaggagggagccaggaaacagccctgggggggctggagccctgagggctgtcgtacagagcagccctcccactctcaggtgctctgccgctgcaaccacctcacctactttgctgttctcatgcaactctccccagccctggtccctgcagagttgctggcacctcttacgtacatctccctcgtgggctgcagcatctccatcgtggcctcgctgatcacagtcctgctgcacttccatttcaggaagcagagtgactccttaacacgcatccacatgaacctgcatgcctccgtgctgctcctgaacatcgccttcctgctgagccccgcattcgcaatgtctcctgtgcccgggtcagcatgcacggctctggccgctgccctgcactacgcgctgctcagctgcctcacctggatggccatcgagggcttcaacctctacctcctcctcgggcgtgtctacaacatctacatccgcagatatgtgttcaagcttggtgtgctaggctggggggccccagccctcctggtgctgctttccctctctgtcaagagctcggtatacggaccctgcacaatccccgtcttcgacagctgggagaatggcacaggcttccagaacatgtccatatgctgggtgcggagccccgtggtgcacagtgtcctggtcatgggctacggcggcctcacgtccctcttcaacctggtggtgctggcctgggcgctgtggaccctgcgcaggctgcgggagcgggcggatgcaccaagtgtcagggcctgccatgacactgtcactgtgctgggcctcaccgtgttgctgggaaccacctgggccttggccttcttttcttttggcgtcttcctgctgccccagctgttcctcttcaccatcttaaactcgctctacgggttcttccttttcctgtggttctgctcccagcggtgccgctcagaagcagaggccaaggcacagatagaggccttcagctcctcccaaacaacacagtagtccgggcctcctggcctggaatcctcagcctctctggccgccagtagcctgaggctacggctcctgctagagagggtggcaggcctgctgctggaccccagaggccactgtgaccgccaaggggccttttccacttccacggcctctccaggcactgaggggaaggcattgctctacctctccctgacattttgctccggggcagatccaaccttacctggggcagcaaactttgtcctggtacctgggcccagctcgccagggatgtgggcagagcaccagcctgggcatcaggaagccaagtttcaaggactgtctttgagtctgtctgtatgaccttgggcctgccacttctcacagaccctaggtatccacagctgtgacatgggggcaagcggctttgtttcagcctaacccaggagcttagtaaaaattgcataagaccagggggaagagtgtcagcgtggggtgggaattcccgcggcctccacctgcttgctaggggcaggatctcattcaggctgccctggaagcacctgcttggccctgccaccttcctccaggggagggccagatggcatcctggcttggggcgggtgggacctacccaggctctgagactttactggcctatgcctgaggcctcttttcctttaactccctaaattatgatgactccaagtccaagcccacccttcccaaagattgggaggttccgccgttcccagaggctcctcctgcggtgctcccaagacttccatagaccatctggaccagtagcccatcccgcagttttcttgggggcagaggaaaacgcttctttctcctccagctgaatcagctggatcccagtgtcctggctgtttggtgattgggcaagattgaatttgcccaggtaggcgtgagagtgtgggttttaaattcgaagctcaggccatagtttcagagaatcacccttaccccagaccttcatgagacagtgctcatgaagccagtgcgtttcccagaacgaacactaggcggcaccgttggtccacactcagaggcccttggcgccaagactgcatctagaatcgctcaaacacctgtttgcagaccccatgcaccagctggaggggccgtaactgcaggactgcgcctactgagtgacccatttcctccaggaggaaaggcaagacacgcttacacggccatttgtctcttttcccaatgcggcggtgcactttcgctcttgggggctgcaccccagacatagctggcaccagagcagggtgctcaggtggtgggtgctcagggccctgccccaggccactgggccgttttgatgacctcgaaggtcacaggcagaaaataggagcaggatttcccctggggaaaagttctcctgggacatcttctgctcttctgtacatttctagatgcaaataactccttcaccaggcagtgagtggcgtaggctctggagccaggctgcctgggctccaatgccagctctgccacttgctagctgtgagactgtggacaaaccactcagcctctgtgtgcctcagttttcctatttgtaaaatagaggccatagtggtacctattttgaagactaagtaaaagaattcaaataaagagacttggcacagagtaagtgctcagt

SEQ ID NO: 77 - DNA, 2817 bp, Homo sapiens
cctggggttctatgagaagcaagaagtagctgtgaagacgttctgtgagggcagcccacgtgcacagcgggaagtctcttgtctgcaaagcagccgagagaacagtcacttggtgacattctatgggagtgagagccacaggggccacttgtttgtgtgtgtcaccctctgtgagcagactctggaagcgtgtttggatgtgcacagaggggaagatgtggaaaatgaggaagatgaatttgcccaaaatgtcctgtcatctatatttaaggctgttcaagaactacacttgtcctgtggatacacccaccaggatctgcaaccacaaaacatcttaatagattctaagaaagctgctcacctggcagattttgataagagcatcaagtgggctggagatccacaggaagtcaagagagatctagaggaccttggacggctggtcctctatgtggtaaagaagggaagcatctcatttgaggagctgaaagctcaaagtaatgaagaggtggttcaactttctccagatgaggaaactaaggacctcattcatcgtctcttccatcctggggaacatgtgagggactgtctgagtgacctgctgggtcatcccttcttttggacttgggagagccgctataggacgcttcggaatgtgggaaatgaatccgacatcaaaacacgaaaatctgaaagtgagatcctcagactactgcaacctgggccttctgaacattccaaaagttttgacaagtggacgactaagattaatgaatgtgttatgaaaaaaatgaataagttttatgaaaaaagaggcaatttctaccagaacactgtgggtgatctgctaaagttcatccggaatttgggagaacacattgatgaagaaaagcataaaaagatgaaattaaaaattggagacccttccctgtattttcagaagacatttccagatctggtgatctatgtctacacaaaactacagaacacagaatatagaaagcatttcccccaaacccacagtccaaacaagcctcagtgtgatggagctggtggggccagtgggttggccagccctgggtgctgatggactgatttgctggagttcagggaactacttattagctgtagagtccttggcaaatcacaacattctgggccttttaactcaccaggttgcttgtgagggatgagttgcatagctgatatgtcagtccctggcatcgtgtattccatatgtctataacaaaagcaatatatacccagactacactagtccataagctttacccactaactgggaggacattctgctaagattccttttgtcaattgcaccaaaagaatgagtgccttgacccctaatgctgcatatgttacaattctctcacttaattttcccaatgatcttgcaaaacagggattatcatccccatttaagaactgaggaacctgagactcagagagtgtgagctactggcccaagattattcaatttatacctagcactttataaatttatgtggtgttattggtacctctcatttgggcaccttaaaacttaactatccttccagggctcttccagatgaggcccaaaacatatataggggttccaggaatctcattcattcattcagtatttattgagcatctagtataagtctgggcactgggtgcatgaattccactccttccagaaccaactgcattggttttccatgaccttaaggcagtagttctcaactggggggcaattttgcactgaagagagcatttggcagagtctgaagaagtttttggtgtcacagctttgtggggagcatgctatggcatttagtgggtaaagaccagggatgctgccaaacctgccttgcacaggacagcccctgcaacaaagaattatccagacaaaaatatcaatggtgctgaggttgagaaaacctgccttaaggggctgggatgcttttgaactagcttaaggcccaggactgtggagtgtgtggaccaccccacagaggagggactcagatttatttactcttgctggatctgtagtgatggagttccttctggtgtcagccccacaggaggctcccaggcctccctcacttcccatacccagtctaggagctccttctggctcccaagcacccagagctttcctccgccttttagttttggttcctccactggaatgtaggctcctcacgggcgatggctgtcttttcttgactttgtatcttcactgccaagcaaaaagtctgccaagtgggaatgttcaataaatattcattgaataatgaatgaaccatcttcgtacatgaataataatactgtcttacgtttttctggtgctttataatgtatacattacatctgagtattttattttatttaattttcaaaacaatcctttaaggtcaacattgttatccttattttgctgatgaggaaactaaggttagaaacattttgatttcctctaggacgtatagctaggaagtgttactatcttgatttgaacaaattttctggtgctaagtctgatgttctttccatgaatcattgtggtggttgagatggagctttgtaatgggaataaaacagtaccttaggttctttctgaaaaggaggtatctagcaatggataaatagataccactgaatgaaattaaatgttgattaggaacaaatttaaggcttaaaaaatactttatgagcagcaagattgctttaacttttaaaatgaagctttggttgtctgatttgtaatgagcacctggatatgtcaattaaaatgcccatttgtgaagc

SEQ ID NO: 78 - DNA, 2066 bp, Homo sapiens
cgcttttttttttttttttttttttttttttttacagaggccaaatttgcatatttgaaatacaggaattttaaatgtacaatttgccaaatttttataactgtatataccaagtaaccatcacccaaatcatatgaaacacttccattcccccataaagttctcttgtctccacctacagtcatcctaacagccccaaccaacaccgcataggcaaccactgtgctgatttccattattgtagattagcttgattttacttgaaattcacataaattgaatcatactacatgtactccactgtgtctggcatcttttgcttaacaatgttttaggacgcatctgttttattgcatgtatcagtagttcatattttttttctgctgagtagtaaccccttgtgtaacatgcactcaatttgtttattcttctgttgatgaacatctggactatttctagttattgacaattatgaattatgttgctatgaatattctcttacaagttttgtgtgtctgtgtgtgcgtgtgtgtgtgtgtgtggacatgttttctttttaaaataaatacatagaagtggaattcctggcttaaaaggacagaactttataagaaactgccaaagagttttctgaagtgattgcacaacatcacactccaatcagaaatgtatagagttcaagtgcaccatatcctcatcaatattagtgttgtgtagtgtttagctatcctaatgggcatgatatggtatcccattcatgttttggtttattgttactttataggagttatttatattttctggatacaagtcctttgtaatataagcatactgtaaatatattctcttatctgtaacctgccttttcattttcctaacagagtttttgatgaacacagaatttaatttttttttttttgagatagggtcctgttctgtcacccaggttggagctggagtgaggtgatcaagtcagtctcccaggctcaagtgatccccctgacttgggcctcccacatagctgggactacaggcgtatgccattatgtctggttaattttttaatttttttgtagagacagagtctcgctatgttagccagtctggtctccaactcctgggctcaagtgctcctcctgccttggtctcccaaagcgctaggattacaggcatgagccactgtgcccagctccaggctttgaattttgatgtttataatttttaaaaaaatccatcttcttagagatattaaatttattaaaattttcaaaaaaaaagcttatgactgtgttaatattctctgttatttgtctgttttctattttatttttctactcttatttccttcttttaaaattaatatttttaataaaattgtaattttaggcacaattattttgagataatcttaattggcttatctacttaaattgaacacatgagtttttaattttaaaccttttttcctttctaatcctttctagtataaacatttaaaactataaatttccttctaaatactttttagcagcattctacaaattttggtattttgtatcagttatcattccatcaaaatattttgtaatttttcttatagtacttttcttcaatacatattttacatatatcaaacatttatatatatttgtatatatttgtcaatattcatatatatttatatatatattagaagtttgatttgcatttcacatatttgaggattttgtagatatattgttctcccaacttcattaagcataattgacaaataaaaattgtatatatttacagcacacaatatacttttttgttatatatatacattgtggaatgattaaaccaaggtaattaacatatctattcacctcatatacttatcatttttgtgtgtggtgagaacatttaagatctactttcttatcaatagacattatattgttactgcttctcgtttgattcttttgcagtcaaagagtgtagtctataagaccacaatctagaaatttaatattttttatgactcaacatatggtctactttggtgaccgtttcatgtgaacttg

SEQ ID NO: 79 - DNA, 2044 bp, Homo sapiens
cacatttcctaaagtgggagggaggcggaggagtgggatagcttttgattgagggcattgacatttgtctaaggaattaaacaactgggcagctagatgacctcagtaaccagtctcgtctcagccccagccttttgatgctcatcatcttgtctggttttataaacagggagatgaatccaccttcatcggacttggcaggacagaggcatgttcatctgtgtaatcaggtttaatagcagtggcgcttgtgaaatagtttgcagtcctggtgcccagggtggaagccttctttgctcctttgtgttcctggggtgtgatggcatgcctggccctgcgccttccgtcctccaggctcccaagctgagggtcaggggccctgtcctgggcaggggccgtggaaggagcccttggtcaggagcttggagtagcaatgtcgggttttctgaatgagaagcaaaacaacactcgggaaatgagcctcgtttggctggaaatagtgtgccagtgttttcttgcttcgggttagataccagttaatttacccattgtttttcattaactaatacatcaaatttctgagcacctactgtgtgtcagggctaagggataagccagcgaccaatagacaaggtccctgcccctcacagcaaccatctagtgatgggctcaagtcacagggcttctgtctgaataaacttgtgtatctccacaaagagatgtttttgttgctgcaatggatttttcatcttgaaaccccagtcactttgatgtatttctggtccccaactactgtcaaacatttactttttaactcctcatgaccactttgaagaaccagaaagggaagataaagaaaataacattgcaatgagcagatctttggactagagcattttaaggagaaagggcttaattttgaagaaagtcaaaatagaattaagcatttacacttagcttatgatcccaatttttttcatattctttgcattgaccgtaacatttttcagtgtgcctggcaagaatttggtttaaatatgtggatttgatttaaatataaattgtacttacaaacggtactccagttgcccattaccatggatattttggaagtgattatgtactgaatcttaccatgaagcagtagtccatgtatctgaattacatttaggccttttaaaacatatcacattatgtatatagttagaaggagggatgagatgggtatttttgaattgagtttaatggcttacttcaataggtgaataaggttctgctctgggaattaaagggacttttaagtttctctcttgactctgatgtgcctttcactgaacagtaaaggaccggggagacttgcccagctctcctacttgacaaaaggtgaaatagaatgatgccatgaaatgcatcaatgtaaaatgcagttttaagattgcattttaacttgagagggtcgtgaagctcttgccttcccattaagcccccaggaataatctccaggtgtgtcttctggcactccacgctgcctgccttctgatgcttcctatgaattgttggaaccagccatatccttctcacttctgccacaaaaactcctggtggttttgtactttgccaccttgtttaggtttcataggtgattggttcaaggcagtgcctatctgcacttccctgtaactctcacttttttttctttaatgtggcctgcatatgaatatatcaacactttttaaattaaaggctaatgagctcactgcacagcctgagtacgtttggtatttggccttcttggagatgctctgcatgtgtcaaatgttattttcagaaaactggctaaacttttaatgggacctgttgttaaatcaccctgtgttttccccataaacacgaatgttaatttacatttttaacctaactgaatgagttgtttttcttaaattcctttgcagtttgaaggaacataccttgcaacaggaaagctttaagaaagaggacgaaaaggctttataatctttcttgaagagaccctgttgctaaaaag

SEQ ID NO: 80 - DNA, 1035 bp, Homo sapiens
  misc_feature 1000: n = a,c,t, or g
gggtgatgggattttataccaacaactgtttcatcttaaaaatatgtatatttttatattaaaaattgtacagtatgtcatctacccaataggaaagtcaacaggatctttattttttgaaagctttagccatccactaagtgccctttttcataagagaagaaaattgtgcataaaaattggttatgtttgttttttagtcatcttttttaacatatatttttgattgacaaattgcctttcaaatttttggggctagttgagatttaaagagtttgatatgccttctatttttatggagaaagtaattttaaaatggcaattggtgtttctaagccattgactaataaaacatagggttggctagtaattattttgttaacttgatgaactcaagtatgactattatttattgtacatttgataagacaatttttggaattttgaattgcacaaattacatgatatcttttgcatttatgttactatattgtacttctgacaaatctttattcctgggtggtatttttaagatatctttacctataaaaagtgtttaaggttcataggactcgacaagagctatctggtgattttctcattagtaacatgcaacgttgtactgcaaaatttcaatcaacatgacaacttataatgagtggagatttcatattaggtactaaatattatagtattatttctattttctttttccaaataagaagcttggattattttattttgtggtctttatcattaactttaattctttctgtactgtgtataatatttttatattattggccttaccataaaattatttagaaaggttgtcaaaataagttatacctctttggcaatagatagatgtatacatctacctactatgatctacaattttaggttaagtgaagcttgggggggctactgacttggttaccttcttgtctcttgtcccaaagatttaaattatgtacctttgtatagctcttctgccccnttttgacttctgagatgaaagtatttactaaaatt

SEQ ID NO: 81 - DNA, 1113 bp, Homo sapiens
ccaaggcaagactggcacccagcacagcagtgactgaccacataccccactctccaggacccatggagtccttcagctcaaagagcctggcactgcaagcagagaagaagctactgagtaagatggcgggtcgctctgtggctcatctcttcatagatgagacaagcagtgaggtgctagatgagctctaccgtgtgtccaaggagtacacgcacagccggccccaggcccagcgcgtgatcaaggacctgatcaaagtggccatcaaggtggctgtgctgcaccgcaatggctcctttggccccagtgagctggccctggctacccgctttcgccagaagctgcggcagggtgccatgacggcacttagctttggtgaggtagacttcaccttcgaggctgctgttctggctggcctgctgaccgagtgccgggatgtgctgctagagttggtggaacaccacctcacgcccaagtcacatggccgcatccgccacgtgtttgatcacttctctgacccaggtctgctcacggccctctatgggcctgacttcactcagcaccttggcaagatctgtgacggactcaggaagctgctagacgaagggaagctctgagagccctgagcctagcacattccaccttgacaaaatggttgactgagaaaacacagataatgggcttcctaaccctgctcacctggcactaacacttttcaatcttcaggcttcattccttcccaagagtgcttttgactctgagaccagcccacccccaaacagctagtggagaaggagcaatgctgaggggtgaggcctctctcccactccagccccaggacaggaaacagaactgcctgaaaaaggtgaagtgaaacttggatctctatttctcccataagggacttctgaaacagggaagccccctcccatgtgaaccaaggaaaggaggcacagcccagagaacccctttggggatactaaagacagaagaggggaaggtggcccttagagacagagcttggacagatgccagaggctctgttccagagtgcaggaagaaggggctggggcaggggagattctcataggggaaataaaactactaaaatac

SEQ ID NO: 82 - DNA, 1574 bp, Homo sapiens
ctccttgggagaatcccctagatcacagctcctcaccatggactggacctggagcatccttttcttggtggcagcagcaacaggtgcccactcgcaggttcagctggtgcagtctggaagagaaacgaagaggcctggggcctcagtgaaggtctcttgcaagacttctggttatacattcatcagttttggcatcaattggttgcgacagtcccctggacaagagattgaatggatggggtgggtcaaccctaatacaggtgacacagaatatgcatcgaagttccagggcagagtcaccatgacgacagacagacccacatttacagtccacatggaattgaggagcctggcacctgacgacacggccgtatattattgtgcgcgaggctttaaggtggtacccgctgctacttatttcgactattggggccagggaaccctgctcaccgtctcctcagcctccaccaagggcccatcggtcttccccctggcgccctgctccaggagcacctccgagagcacagcggccctgggctgcctggtcaaggactacttccccgaaccggtgacggtgtcgtggaactcaggcgctctgaccagcggcgtgcacaccttcccagctgtcctacagtcctcaggactctactccctcagcagcgtggtgaccgtgccctccagcaacttcggcacccagacctacacctgcaacgtagatcacaagcccagcaacaccaaggtggacaagacagttgagcgcaaatgttgtgtcgagtgcccaccgtgcccagcaccacctgtggcaggaccgtcagtcttcctcttccccccaaaacccaaggacaccctcatgatctcccggacccctgaggtcacgtgcgtggtggtggacgtgagccacgaagaccccgaggtccagttcaactggtacgtggacggcgtggaggtgcataatgccaagacaaagccacgggaggagcagttcaacaagccgttccgtgtggtcagcgtcctcaccgttgtgcaccaggactggctgaacggcaaggagtacaagtgcaaggtctccaacaaaggcctcccagcccccatcgagaaaaccatctccaaaaccaaagggcagccccgagaaccacaggtgtacaccctgcccccatcccgggaggagatgaccaagaaccaggtcagcctgacctgcctggtcaaaggcttctaccccagcgacatcgccgtggagtgggagagcaatgggcagccggagaacaactacaagaccacgcctcccatgctggactccgacggctccttcttcctctacagcaagctcaccgtggacaagagcaggtggcagcaggggaacgtcttctcatgctccgtgatgcatgaggctctgcacaaccactacacgcagaagagcctctccctgtctccgggtaaatgagtgccacggccggcaagcccccgctccccaggctctcggggtcgcgtgaggatgcttggcacgtaccccgtgtacatacttcccaggcacccagcatggaaataaagcacccagcgctgccctgggcccctgc

SEQ ID NO: 83 - DNA, 1817 bp, Homo sapiens
gcccttccagcatctggcaccctggctgagctgggcccccaagtctgtctgagcagagggctttgaggggcagcagccacagcggccttgacaccctcagtctggacttgctgtggctcactgtggctccctgtggctccactcagcagctttgggggcaacagggctgggggtggctggggcagtggctgagggtggctggggaagtggttgggggtggctggggcaatggctaagggtggctggggtagtggctggggatggctcaggcagtggctgaggcagtggctgggggtggctgggtggctggggtgtggctggcgcagtggctacagttgtcccagagtggtgatcaggtgccactacagcatgagccactccctagagcacctgcggctctggtgcctgggagggagttcacagggttctgggggtcggctgtgaccttgtttctctggacggcacttgactgtctgtgcccaggcgtccactctccttcctgctctgcgatgaggtgggtgctggtcaggatgcaccccggacccctgccgcctgctgtaggcaccccgtcatcaggggtgcgccacccagtctgtgcgggggtcaggcccttctctgtgctccaagcaggaggcccagtactgacccccagccctgctcggagcgggggccctactgcgtggacgagaacacggagcgcagaaaccactacctggacctcgccgggattgagaactacacgtccagattcggccctgggtctcagctgtgcgagaagagaagctccgctcccaggacacacagtggggacaaggctagaggagtcggcctttgcagggagctgtggagccaggcaggtcacccacagtggccaggccccttcccttcagggctggtggccgtctgactgcagacttggctaacagactggcctcagggtcccctcctgtgcaagcaaagcaggagccccagggcagggcctcgcaccttcaggcccggtcccgctcccaggagccagatacacatgccgtacaccaccgcaggtcacaggtgctggtggaacacgtcgtgccagcctcggagcctgctgcccgggccctggacacgcaagcccggccgaaggggccggagaagcagttcctcaagtcccccaagggctccgggaagccgcctggggtgccagccagcagcaagtccgggaaagccttcagctactacctgccggccgtcctgccgccccaggcccctcaggacggccaccacctcacgcagcccccaccgccaccttacggccacaagcggtaccgccaaaagggcagggagggccactcgccactcaaggccccacacgctcagcctgccacagtggagcacgaggtggtgcgggacctgccgcccacgccagcaggagagggctacgcggtgccagtgatccagcggcacgagcaccaccaccaccacgagcaccaccaccaccaccaccaccaccacttccacccgtcctagcgccactgccaagcacacctcgctcccagcacaccacggcccgcgacctcagggcagggagcagagcagctgccggctgtgtgcccatggggagcccagcccccaccccccacctccgacagcaaacagcaactgactgcaggtgctggcatgatggaggtggtgcaccttggacacgtggacaaggcccaggcgccctctgctcttctgccctcgatgccacatggcggtgaacacatctgaagccactatgtttcctggctctaaggctcgtctgtgtaacccataaaacctgctttgattccaaaatg

SEQ ID NO: 84 - DNA, 1079 bp, Homo sapiens
  misc_feature 499,542,571,573,600: n = a,c,t, or g
attccagatagtatttaatttagtgctttttacccattttgagttgagttgtagtactttatatattctgactttaaatcctttgtcagacacacatattctttctcccaatccatgccttccctattcattctctgtccagagttttttgctaaagatagaattattaatgatacatcaagtagtggaagtgttttgaaaattctttgaagaatgtgagagctacaccttctaccatgaggcttccaaggttgtatttaaatttgactgaatatctggatggctaagaacagacatttatcttacacatggaaaactgacgaaacctataagcctatgtgtttgacagtgaagtatgttttatggacttaaatgccacaaacagttaagtccattggcttggagatgacaagcacaagtttctggtatgtctagtgttctcattcactgattcagtcagtacacagataatcactatagagaacttaagaggctggcntatgttatacctaaatttttactttcttgtatacaacaatgcnaaaattgagcagattgataactgccagcnanaccatagatttaagataaatgaatganttacccaaccctaaaattccatgggtaaaaattttgattcctttattttcaatactgcgttccttatagggcttacatgcatatgcaaggatattttatcttattcattcatttcatactctcaaaacaccaaacttcaaaaagttaattatttgtcataatgcattataccatgtgtggtgtcaatacattttagcggacaaagaagaaacatgccagttaaaacatttctgctactgggattctttattaaatattttgagaatgttattttgctagttcttaaggttaagtttttcatcaaagactcaggtacctattattgttccctggtgaaactgaggagaaaagttaatcaaccaggttcctcccacagtttgcccgtgtgttatgtatcagttatacaggtatccccccaagttcaagtcaaaagaaattcctaactttttatatttctggagctataaaacccctgattt

SEQ ID NO: 85 - DNA, 1011 bp, Homo sapiens
  misc_feature 971,975,977: n = a,c,t, or g
ggtctccctgcctgtaccctcctctccactgggcccattctccaccggcagccagcatgatctctaagaaatgtacatctgtcatctgtcatatctgctgaaaattgttcagggcttcctgctgccttgagaatgagggtctgaatcccaaacaagggttcaaatctcaacctctcaggcctaccctgaccttacgtatctttcctcagggcctgtgcacatgctgttccttcttcctggaatgcttgtccccatagttttcagctggcgaatgtgagtgaggtctccccttaaatgtcatctaagagagccctttctaattcctccccttcatcttaactctatccccaatacactctctcacagagactgttcttttccttctgagaccctactccagcttgtagttctaaatctgtgattatgcactgtctgtcttcctcttgaggtcaggggccatttcttttgttctctgctatgctcaggacccagatcaaaggagctcagtaactatttacaggcgtacatcatatgtggaggacacttatgctgtgatggccccacacacagcttcctttggggtctgtcccctgctctccgttacccgcgtggtagccactgagcactggctcttcctggcttcactctctggcatcaaaacttatcagtcctacatctcagtcttttgcaaggtgacacttatctgattacctaattcacacgaaggtgttaatggtggtaatggcatagtatttattaccccaggggacccagaacggtggtatcaaaacatatcattccccagtggtttaaaactctggtagctttccagggagtccaagtggagtccagtctccttagctgagttcacagggccccgtctgcacgacttggcttctgtcggcttccctagccctgacttcccaagccttagtcatcaccctctctcccacccagggctcagcacagtncctngnacagtcaagccctcaataaatgtttactgagtgc

SEQ ID NO: 86 - DNA, 549 bp, Homo sapiens
ccttgaacttcctcagtagacaggcggagaggccacaacatgccgaacccatttcctgtcatcctagtcttgggtcttcaccgcctccttccaaatacccaccctgccagcagccctaggtcttcctgttctgaccccccatcactgctcgttcagccttctagacgtctctctcgtggacatctgttctttagctgttggctttctctgaggtgtgagagggtctatgaactttgtgaatttccccatggccccagtgaaggagcccagataatcccagtagctgttacctgtctccatgtatcaaaggacacagtccagggggagggtggaaggagatgtggtttctctatagtgcaacaaacatggtttctcaatgttctgctgtgcagcaagcagggtctggcggcttggtaggtgggtttcaggagcagtcactattgtaggatgggcttccaatcaaacctcagactaaactcttgtactgaactgattctacctccctcctctagactcagtaaacagtgactattcaacgaaccttagaaa

SEQ ID NO: 87 - DNA, 1539 bp, Homo sapiens
gacctcctgtgcaagaacatgaaacacctgtggttcctcctcctgctggtggcagctcccagatgggtcctgtcccaggtgcagctgcaggagtcgggcccaggactggtgaagccctcacagaccctgtccctcacctgctttgtctctggtggctccattggtgacgatgagatatactggaattggatccgccagcgcccagggaagggcctggagtggattgggtacatctatgacagtgagaccacatcttacaacccgtctctcaagggtcgacttaccatatcagttggcacgtctaagaaccagttctccttgcagctgacttctgtgacggccgcggacacggccacttattactgtgcgaggagtcgggaactccgattctttgactattggggccagggaaccctggtcagcgtctcctcagcctccaccaagggcccatcggtcttccccctggcgccctgctccaggagcacctccgagagcacagcggccctgggctgcctggtcaaggactacttccccgaaccggtgacggtgtcgtggaactcaggcgctctgaccagcggcgtgcacaccttcccggctgtcctacagtcctcaggactctactccctcagcagcgtggtgaccgtgacctccagcaacttcggcacccagacctacacctgcaacgtagatcacaagcccagcaacaccaaggtggacaagacagttgagcgcaaatgttgtgtcgagtgcccaccgtgcccagcaccacctgtggcaggaccgtcagtcttcctcttccccccaaaacccaaggacaccctcatgatctcccggacccctgaggtcacgtgcgtggtggtggacgtgagccacgaagaccccgaggtccagttcaactggtacgtggacggcatggaggtgcataatgccaagacaaagccacgggaggagcagttcaacagcacgttccgtgtggtcagcgtcctcaccgtcgtgcaccaggactggctgaacggcaaggagtacaagtgcaaggtctccaacaaaggcctcccagcccccatcgagaaaaccatctccaaaaccaaagggcagccccgagaaccacaggtgtacaccctgcccccatcccgggaggagatgaccaagaaccaggtcagcctgacctgcctggtcaaaggcttctaccccagcgacatcgccgtggagtgggagagcaatgggcagccggagaacaactacaagaccacacctcccatgttggactccgacggctccttcttcctctacagcaagctcaccgtggacaagagcaggtggcagcaggggaacgtcttctcatgctccgtgatgcatgaggctctgcacaaccactacacacagaagagcctctccctgtctccgggtaaatgagtgccacggccagcaagcccccgctccccaggctctcggggtcgcgcgaggatgcttggcacgtaccccgtgtacatacttcccgggcacccagcatggaaataaagcacccagcgcttccctggg

SEQ ID NO: 88 - DNA, 1161 bp, Homo sapiens
tttgtgcataaagctgtatatcttcttagatgtatgattactaagtatttaagtttgaatatttttaaggctcttgatttgctggaggactgaaaaaaatgaagtgatagtgtctgagaatattcatttgacttattttttacagcatccattccctttcatgttgggagtgttctctttagtggcttaaattctttgcctgcctttgggagtgtggagggtggagtggaccttttgagggtcgagggtgaatgtggccttgctgtttggatagccttttgtttggattctggctctgggcacagggaataacactactttctgaggacagtatcaggattgtctgtagttcctgtgagcctgaggtgctgcatgtgcccacccccgtgtacaggccctgccccagccacagcccactcaccttttgaccctcctgctctgcctatacagtttgaataccagcaggctcagctggaggctgagatcgaaaacctctcatggaaagtggagcgtgcagacagctatgacagaggggtaagtgcctactgtcctcttggattctatattgcaggtagaggactggcatggtaataggtgacagcgttgttggcttgtgcactggtagctgctgctaagaatgggaagggcagtgtttttgactccttggaggtcctggagggtgtttgtggctttggctactccttgctcccaggcctgggccatgcaagcacacaccttgtttctctgatgcaggacttggagaaccagatgcatatagcggagcagcggaggagaaccctgctgaaagatttccatgacacctaagttgggatgtggatgtgccggggtgaggaagatgtggctgcaaggtctcccggctgccatactgcatgctgcaggctctgcctttcatgaccccaggcaacagccagggccccactcctgagagacactggcaacacctcttagttgatttctgttttcttctcttttcactttttgtttctaccagggtagaggccatgttgaactggcctcttttcaggacttttatttccccctggatggttgttgggagggagggaaagtgttttctgaatggctattaatagtattagatcattacaacttatgtaactttcaaaggttgtacaattatac

SEQ ID NO: 89 - DNA, 1466 bp, Homo sapiens
cccagctactcagaaggctgagtcgggaggatttcttgagcccaagaggccgaaactgcagtgagctatgattgtaccactgcactccagcctaggtgacagagcgagaccctgtctcaaaaaaaagaaaaaaaaaaagtaaatttttttaaaaatataaaataatgtatactgatcttagtcttttaatgtgtttgagaccttcatatgattattctgatttttatggataattcttataaattttcattttatttcgctgggtaggagattataggaggaagtattactctgtattttaataaaaccatgattctgaaactaaaatgatagtaaaataagaatatattaaagttcttactaaaagagtaaaagtaataattcctttaatctacagcttagggtgagactaaaggaaaaatcagtccattggaaaaatatacatagtgagaggttttgagaaatgcccgttttgttccgtctggttataagctgcccaggagccattgcttaggtggcttcttgtcacttcttctcttctgccctcccattcccagtcttttctctgggacaggggccaaagttttcaggcatgtatttgttgagtccctaagatcaccatgtttccacaaagttacacaagaaggaagctgttgcctctactaggccctggaaaccaggccttcaccctgcgtgggcaagagaagagactggttaagctcagactgagtcagacctggggctcagatccaaatctcccacctattagctctgtatctgtggccaggcacttcatctctttgttatttgatgtgaagatcttctgcccttcccgtcaactgtcattcttaaaatacttgagttcccataaaagtgctatttttgtacatgccaataacatggtagtaatggcttatattcatgtatcagcagataggctagaattgtcagaacaaacttaatgtaaaagtgcatacttggttacacttttaccaaacacataatcaatttattttctatttcagaaggcattattgtgtaagtgggtttaagggtgggtctggtatgattttagtaagcttgtttggacttagtactgtctgtgaagtgtaagtagttattgtactgaaataatctagggccctacagtgctgatgacgtcgtctcatggagtgtgtgggtgtgtgttccatacctgttatgtcggaaggcactctcatggcaggcccatttggctctttgactttgggaactaaccaggcacatctttatcattactgatttctgcagtttcaggaagttgagggtgcttgctgcttggaggccttcctcgacatatcaaaggctggctgggcgtggtggctcacacctgtaatcccagctttttgggaggccaaggtgggtggattgcttgagctcaggagttctagaccagcccggccaacatggtgaaacctcatctctac

SEQ ID NO: 90 - DNA, 826 bp, Homo sapiens
ttttttttttttttttttttttttttttttctttattttattatttatttcttttaatacaaagctttggcattagcaattttatgaaaaaataaaatgtactaaaaataaatgcttgtgtggcatgattggtaaatgatgcacaaaaataggttcttttttccttcaaggcaaaatcagtcagaaagcaggttttttcttcttcaaaaccattctacctcattagcattcaagctagctgtggctctgatgatcatgtagcagagtgtgagggcactgaggaggccaaaactggcaataataaaccattcttttgttactgcaatgttgatttctcctgttctcggagtgagctccccatcctgaggaagaggtgagatccccgaagttcgaagtggctcaaggccaagggagttgtcgccggcgaggtcgccgagggctgatcttcggttaacagcttgggttctggtgagcctttccatatcgaatgctacgttatcagtacatggcaaattcggcacaattcccagggccttcaatatattaagtttgcacataggacaggtacaatgttcactaagccagggatccacgcaggatttgtggaaaacatgcttgcaggggagaattcggacgacatcattctgcttatagctctctatgcagactgcacaatgatcaaagtctgggtcagtttccttgtcacccttctttactgtcctggttgtcaatttactgatggctttcttggctgcatctccgagacgacgctggttcctgtcgcgtgcatttgtgtacctgatcttctgaatgaagaccttagaaa

SEQ ID NO: 91 - DNA, 395 bp, Homo sapiens
ctggagactctggacgaggacgccgcgcagtgctgcagctactccaggtggaccggcagctccgcttccccccgagctaccggaacaggaccgccagcagctgggaggaggactggttcgccaagatccccctggcctggaggcagcagctgtataaactctacgaggccgactttgttctcttcggctaccccaagcccgaaaacctcctccgagactgaaagctttcgcgttgctttttctcgcgtgcctggaacctgacgcacgcgcactccagtttttttatgacctacgattttgcaatctgggcttcttgttcactccactgcctctatccattgagtactgtatcgatattgttttttaagattaatatatttcaggtatttaatacc

SEQ ID NO: 92 - DNA, 772 bp, Homo sapiens
  misc_feature 416,432,463,479,482,490,624: n = a,c,t, or g
cccgtttctgaaatgggcaccgagctaagtctgtgtgcagcattagtacccgctgccttaaaactcaagtttacattattcattaaaaaaagtacatctagtgttgcctgtaatgctggaaaccagtgtatctaccttgctgtgttaaatcatgacagtgagacggtgagatggattcgttttgcacacaacattcaaaacacttcatattgcccccacttgttgaaaaataaatgtagttcaaattgccactttccagtatttttgagcttatttaatgagttctggaacatttatatctaatctatattttagataattactttttatacttttttaactcatggtatccccactccccacccccacctcatttttatttgttccttctcaaagcagccacttagcccacatgngcgaaatcaagtcttncagttatttctgccacaactggtttaagggnttctcttcttcttctnctnttctcttnctcccttctcctcctcctctcttcccagtgacagcatcatcgtgctgtttgcctgtattggctatgccttctaactccaaccagtcacttgagaatattctttcaagattctgggccccgattcttttctgttnaaatccctaaagcaaagatctaattctcaagcaatgtctgtagttcagtgggggtgaacaatgaatatattcatgctaggaatttgtgtctgttgttgtactcacagcagcaacatgagtgtaaacagtagacaataaacttttatct

SEQ ID NO: 93 - DNA, 602 bp, Homo sapiens
attttattttatttaaattccccggcccaggcgcagtgggtcacgccttgtaatcccagcactttgggaggagcgaggcaggtggatcacctgaggtcagttcaggaccagcctggccaacacggtgaaaccccatctccactaaaaatacaaagattagccaggtgtgctggtacacacctgataatcccagctacccgggctgctgaggcagaacgaattgcttgaacctgggaggcagaggttgcagtgagccaagatcgcaccactgcctccagcctgggcgacagagagagactctgtctctaaataataaataaataaataaataaataaataaaattaaaaaaattcccctaccctcttgcttttaataagaaacagggtcaccttaatgttgtccaggccggagtgcaatggctatcccactattgatcagcatgggagttttaacctgctctgttgcccaacctggaccagttcacccctcctcaggcatacctgttagtcccccactcccaggacaccctattgatgctgaatttagtgcagacactcagtccatatgtagaacacagtgcgctaccctccacccttagaaa

SEQ ID NO: 94 - DNA, 1085 bp, Homo sapiens
  misc_feature 1019: n = a,c,t, or g
ctattctaaagcgtctgttcagggtttatgcccatatttatcaccagcactttgattctgtgatgcagctgcaagaggaggcccacctcaacacctcctttaagcactttattttctttgttcaggagtttaatctgattgataggcgtgagctggcacctcttcaagaattaatagagaaacttggatcaaaagacagataaatgtttcttctagaacacagttacccccttgcttcatctattgctagaactatctcattgctatctgttatagactagtgatacaaactttaagaaaacaggataaaaagatacccattgcctgtgtctactgataaaattatcccaaaggtaggttggtgtgatagtttccgagtaagaccttaaggacacagcccaatcttaaagtactgtgtgaccactcttgttgttatcacatagtcatacttggttgtaatatgtgatggttaacctgtagcttataaatttacttattattctcttactcacttactcactcatttctttacaagaaaatgattgaatctgttttaggtgacagcacaatggacattaagaatttccatcacataatttatgaataaggtttccagaacaaatttcctaataaacacaatcagatttggattttattcttttattttacgaataaaaaatgtatttttcagtatccttgagatttagaacatctgtgtcacttcagataacattttagtttcaagtttgtatggtagtgtttttatagataagatacgtctattttttcaaaattcatgattgcagtttaaatcatcatatggcgtgtgggtgggagcaaccaaagttatttttacagggactttattttttgatctttatttgagattgttttcatatctatctaaattattaggagtgtgtgtatcagaagtaattttttaatgtcttctaaggatggtcttccaggcttttaaactgaaaagcttaattcagatagtagcttttggctgagaaaangaatccaaaatattaataaatttagatctcaaaaccaaaaaaaaaaaaaaataaaaaaaaaaaaaa

SEQ ID NO: 95 - DNA, 1143 bp, Homo sapiens
tttcctggggagagctacccgccagcttgggctgccgtgggcccctggctgaacaacgtcctgtgtctggcaggtggctgaggtcctgtgctctggtgtgtgggtgattgggcagggcctgagctggacaggggagctcctagtaggggaggggaggggatgctgggatctaggtgacatgcctgtccctgtctgctcccgtctggctgccagacgtccttctcttcccggataagaagcagaggaccttccagccacccgcgacaggccacaagcgttccacgagcgaaggcgcctggccacagctgccctctggcctctccatgatgaggtgcctccacaacttcctgacagatggggtccctgcggagggggcgttcactgaagacttccagggcctacgggcagaggtggagaccatctccaaggaactggagcttttggacagagagctgtgccagctgctgctggagggcctggagggggtgctgcgggaccagctggccctgcgagccttggaggaggcgctggagcagggccagagccttgggccggtggagcccctggacggtccagcaggtgctgtcctggagtgcctgggtgttgtcctccggaaatgctggtgccggaactcgctatccctgttgtctacctgctgggggcactgaccatgctgagtgaaacgcagcacaagctgctggcggaggcgctggagtcgcagaccctgttggggccgctcgagctggtgggcagcctcttggagcagagtgccccgtggcaggagcgcagcaccatgtccctgccccccgggctcctggggaacagctggggcgaaggagcaccggcctgggtcttgctggacgagtgtggcctagagctgggggaggacactccccacgtgtgctgggagccgcaggcccagggccgcatgtgtgcactctacgcctccctggcactgctatcaggactgagccaggagccccactagcctgtgcccgggcatggcctggcagctctccagcagggcagagtgtttgcccaccagctgctagccctaggaaggccaggagcccagtagccatgtggccagtctaccatggggcccaggagttggggaaacacaataaaggtggcatacgaagg

SEQ ID NO: 96 - DNA, 2047 bp, Homo sapiens
  misc_feature 2037: n = a,c,t, or g
ggcaagatgtgcgcccgagccccgccgaagcgaggccacccggagccgtgcccagtccacgccggccgtgcccggcggccttaagaacccggcaacctctgccttcttccctcttccacttggagtcgcgctccgcgcgcctcactgcagcccctgcgtcgccgggaccctcgcgcggaccgccgaatcgctcctgcagcagagccaacatgcccatcactcggatgcgcatgagaccctggctagagatgcagattaattccaaccaaatcccggggctcatctggattaataaagaggagatgatcttccagatcccatggaagcatgctggcaagcatgggctgggacatcaacaaggatgcctgttgtttcggagctggggcattcacacaggcgatacaaagcaggggaaaaaggagccagatcccaagacgtggaaggccaactttcgctgtgccatgaactccctgccagatatcgaggaggtgaaagaccagagcaggaacaagggcagctcagctgtgcgagtgtaccggatgcttccacctctcaccaagaaccagagaaaagaaagaaagtcgaagtccagccgagatgctaagagcaaggccaagaggaagtcatgtggggattccagccctgataccttctctgatggactcaacagctccactctgcctgatgaccacagcagctaccagtttcaggctacatgcaggacttggaggtggagcaggccctgactccagcactgtcgccatgtgctgtcagcagcactctccccgactggcacatcccagtggaagttgtgccggacagcaccagtgatctgtacaacttccaggtgtcacccatgccctccacctctgaagctacaacagatgaggatgaggaagggaaattacctgaggacatcatgaagctcttggagcagtcggagtggcagccaacaaacgtggatgggaaggggtacctactcaatgaacctggagtccagcccacctctgtctatggagactttagctgtaaggaggagccagaaattgacagcccagggggggatattgggctgagtctacagcgtgtcttcacagatctgaagaacatggatgccacctggctggacagcctgctgaccccagtccggttgccctccatccaggccattccctgtgcacccgtagcagggcccctgggcccctcttattcctctaggcaagcaggacctggcatcatggtggatatggtgcagagaagctggacttctgtgggcccctcaacagccaagtgtgaccccactgccaagtggggatggggcctccctccttgggtcattgacctctcagggcctggcaggccagtgtctgggtttttcttgtggtgtaaagctggccctgcctcctgggaagatgaggttctgagaccagtgtatcaggtcagggacttggacaggagtcagtgtctggctttttctctgagcccagctgctggagagggtctcgctgtcactggctggctcataggggaacagaccagtgaccccagaaaagcataacaccaatcccagggctggctctgcactaagagaaaattgcactaaatgaatctcgttcccaaagaactacccccttttcagctgagccctggggactgttccaaagccagtgaaatgtgaaggaaagtggggtccttcggggcgatgctccctcagcctcagaggagctctaccctgctccctgctttggctgaggggcttgggaaaaaaacttggcactttttcgtgtggatcttgccacatttctgatcagaggtgtacactaacatttcccccgagctcttggcctttgcatttatttatacagtgccttgctcggcgcccaccaccccctcaagccccagcagccctcaacaggcccagggagggaagtgtgagcgccttggtatgacttaaaattggaaatgtcatctaaccattaagtcatgtgtgaacacataggacgtgtgtaaatatgtacatttgtctttttataaaangtaaattgct

SEQ ID NO: 97 - DNA, 2082 bp, Homo sapiens
  misc_feature 2046: n = a,c,t, or g
gatatttaggaaattattcaacttttaaatacagtgtcctaaccttgtcctgacaacaccactgagtatcctcactgacatacctcagaacagaaactgcgcaaaccaacacatgcaaggtcataacggacactctagccttcataggcaaggtggccttgcctgatctggttatggtcaggcaagaggtctttttttttttaattaaatacttatttttttaacatgcaggaaaacagctggcttcatgctccatgaaatatgtagcttcagttgaattctctttttttagaagaatttttagatccagacacattgttttctttatcggtgaaagagcaatcaatgcctagatatctatctatgagcccaaactataatgactctcaaagactcccagatttataccttctggtgccccatgatttatagtaactcatccactcctgccattctatgggctttcactgctgctttattgaaacaggagtactgacagaaactttatgcacttggaggtttttaggctatttaattagtcactcatttctagatcttcaaagggctgtatgtgtgtgtgtttgcatgtgtgtgtgttttctcgttagtcacactggctcttgttggatttgtgtgtgtttttgtttgtttgtttttttttttttccatttgcacaaggtcacattcagagctcttcctcccttaggagaggttgcacattcgtcacttcatctgcctcccatttcctccagttgggatcacacagcccttcctgaggtattaccatttttccatttcttctttgctccctcctttcttttaataactctgggagacagggaggcaccttgtaaagttaatttcctccaaagctttcaaagcaaaggcatctcccagcccagacaccaccacccctctccacccctcagtgacggcgcacacccctcctcacagccttagtcactctgggctgtgcccgccacctaggactcaccaggccccagctctgtcaggcacagtgagttcctctgtcctgtagctcttaggtctggggtgggaactctagataagaagagtctcctcatttatctccttggtgccttccttctcctttttcatttcctaactgtgctcccctgctttctgtttctctctggactttcagaactcatgggtggcccgcctgcctgtaccaggaatggcatttcttcttcaaaggcctgcggttgcagccacccagctctaccaagcacacaaacctttgaaattgctgtggctttgctgcctgcctacttgaaagcaagagctgttttttaaacacccctttggtttcttggggcaaagcttttctcaatcctattttatttatgcgaacatgatctgtggcttttgaatgtttgcttttgaatgtttgtgttaacagattaagctgaaagcgtttcctctcaccggagagagggccctgcacagctgggggccaggctgctcagctcaagcaaaagctgtcccaagaggaacaagtcaccagccaaggaagtctggaagctcagagaggaattcattgaggcctttacgggcagcagcggtcagaactaggatcatagactgggccatgaagctcggtaatttatttgattaataggaaggactagaccggagacacctagatttttgcaaatatatttttcgaattgtgcatatatttactgaaactctgtgtggttttcaacagcttgggtgtctaatctttcgccccatattcccagccttctgaagcactcctggcagtattaagaactggccgggcatggtggctcacacttgtctccccgcactttgggaggctgaggcgggtggatcacaaggtcaggagttcaagaccagcctggccaacatggtgaaactatgtttctactaaaaatacaaaaattaattagccaggcctggtggcaggcacctataatcccagctacttgggaggctgaggcaggagaatcgcttgaactcgggaggcagaggttgcagtgagctgagatcacgccacgngactccagcctgggtgacacagtgagactctatccc

SEQ ID NO: 98 - DNA, 1736 bp, Homo sapiens
  misc_feature 1180,1181,1260: n = a,c,t, or g
acaagaacatgaaacacctgtggttcttcctcctcctggtggcagctcccagatggggcctgtcccagttaaagttacagcagtggggcgcaggactgttgagacctgcggagaccctgtccctcacctgcgctgtctatggtgagtctttttcttatagtgatagttactggagttggatccgccaggccccaaggaaggggctggagtggctgggggcagtccaccgctactggaagcaccacgtacaacccgtcgctcgagagtcgagtcaccgtgtcaatagacaagtcgaagaaccagttctccctcgacgcttgacttctgtgactgccgcggacacgggctgtctactactgtgcgagaggccccgggggatatcggattacgatttttgaaattcatatcaacacctacagtgccattgactcttggggccacaggacacctagtcaccgtcacctcagcttccaccaagggcccatcggtcttccccctggcgccctgctccaggagcacctctgggggcacagcggccctgggctgcctggtcaaggactacttcccgaaccggtgacggtgtcgttggaactcaggcgccctgaccagcggcgtgcacaccttaccggctgtcctacagtcctcaggactctactccctcaacagcgtggtgaccgtgccctccagcagcttgggcacccagacctacacctgcaacgtgaatcacaagcccagcaacaccaaggtggacaagagagttgagctcaaaaccccacttggtgacacaactcacacatgcccacggtgcccagagcccaaatcttgtgacacacctcccccgtgcccacggtgcccagagcccaaatcttgtgacacacctcccccatgcccacggtgcccagagcccaaatcttgtgacacacctcccccatgcccacggtgcccagcacctgaactcctgggaggaccgtcagtcttcctcttccccccaaaacccaaggatacccttatgatttgcgggacccctgaggtcacgtgcgtggtggtgcacgtgagccacgaagaccccgaggtccagttcaagtggtacgtggacggcgtggaggtgcataatgtcgagacaaagccgcgggaggagcagttcaacagcacgttccgtgtggtgagcgtcctcaccgtnntgcaccaggactggctgaacggcaaggagtacaaggtgcaaggtctccaacaaagccctcccagcccccatcgagaaanccatctccaaaaccaaaggacagccccgagaaccacaggtgtacaccctgcccccatcccgggaggagatgaccaagaaccaggtcagcctgacctgcctggtcaaaggcttctaccccagcgacatcgccgtggagtgggagagcagcgggcagccggagaacaactacaacaccacgcctcccatgctggactccgacggctccttcttcctctacagcaagctcaccgtggacaagagcaggtggcagcaggggaacatcttctcatgctccgtgatgcatgaggctctgcacaaccgcttcacgcagaagagcctctccctgtctccgggtaaatgagtgcgacggccggcaagcccccgctccccgggctctcggggtcgcgcgaggatgcttggcacgtaccccgtgtacatacttcccgggcacccagcatggaaataaagcacccagcgctgccctgggcccctgcct

SEQ ID NO: 99 - DNA, 1379 bp, Homo sapiens
  misc_feature 1343: n = a,c,t, or g
cttgaggacctactatgtgcttagtgctttatatattttgtgaatcacttaaatcttcacaacaacctttagggcaaagattattacccaagttttaaagacgcagaaactggagctcagagaggttaagtaactttcctgatgttgcacagccactaagtgacaaagcctgaactctttccgcctcactacactgcctctacttcaccaatctctgccccgaggccccatctttcatctttcttcctattctgagccttttcccttttccccagatgatggacatggctgtctgatgaagactctagactgtcacagagcatggtctcaacaagcttaggacccatgtttgctggggagagtctcagcttcaaacactcgggcttgttttcccataagtacattcatccttgtcaaatatgtgtcctgatctttgctttggaaaatgtggtccacagaagtgagctgtgctctattttgacgctgaatcttactcagcttgtggtcaactccctccttcacttggtgttttccttgtttatttgtgtcgagccaaattatgttgttaggttttgtcactaacgaaccccttgcactcatccctgctgaatttcacccgggtttcacaggaccttcttcctctaacccgtccaactggaagtccctcccctctctgctgtggggtttggcccccctcccaaccttctgtcatttcaagtcacttcaggcttcggaaaactgtctccaccctcccaaaaggtcccatctggtttcctcccttcactgctctggaaaccctacataggcctccctgactgggggagggagggcaacctccctgggaggaggggcctccctgagagggagtggggtggggaggacaggtaaagggaagcagaatctgctcccctaaattggttgggggtggaggaggatctggatgtgactgggagtgtctgcaggctgtagcctttggctggaacctctcctaggccagcttcagacttaatctggtcccaggagggtgtcaggggtccatggacctctttttccgatcagagggatccttagtcctgggggaccatttggcagaaggtcctttaactcagtcctggcccctgagtacaccccgttgtctgagcactgcaggctcccaggctggttgctaggtgcagggctcaaacaatgtagtgtgacagttccgcagcccacctcaggggcctccccaagccacaagggtgtggtttgcagtctgggtacattctgtaccctcactctgggggcgggtttgtggttccaagtgctgtgcagccgagccccgcccatgcctttcctctccagcnacaaaaacaagcttgacaccaagaggggaggaattg

SEQ ID NO: 100 - DNA, 1309 bp, Homo sapiens
  misc_feature 1272: n = a,c,t, or g
gaaaacgtaaaccagcgtttttcccctgtgctgtgaacggtcaccatgttgtttctttttaattgtggtatcgaagggcttgggtttttaaggttatttttcactgagcctttcagtctgtctctgtggcctcaagcactcgcctcccttagaactgctcattctagggtcatgactactactctaaatgaatctcctgcagagactttctgccacattttcccctcctctctctaggcagcttagcaacttgtctgcctgttgtagtatttcattacctaattcattattagctgggacctactgagagttttgaggcattggagaatgagggtctatgaagagtcaggttcaatctgagagcaaactgtgttgtggatgggaatttagaaaaggtatttcctggttgcagaggggaaggaggtgtgtggcttttcctttatctctgaagccaaactttgatttaggcaaaacttttaactattaaggacctccagtgtgaaacagcttagatggtggcaaaagactggctgaggctataagagatacagggaaagatttgaaagtgaggtggaggacaggcagggagaaaaggtggaaatatgcttctcagtccactcgtcctactccatctccaccttcattgccaccagaaatttgcagaagcgcctgtaggaggcttctagaataccgaaaagacatgatcgcgttacgaattatacaaagtggcccgtgtctctcgcaaactaggtttgatcttctcatgtgttagtgtagaaagataattaggaaaggaagtgttagggttttgatttcaggatcttagtaattgtagagagtaagaaacgaacaagccgagctcaggcttctgtgactgtccgtgtcttcaagtatgatttggaaggcttcgtgtccagtatccctaggagtagtaccatccctgttcttgagaacttgccctgtagggtggcagtggatcatggttgttttcctatatcagagcttgatatgtttgttaagaggtctgtgaccgggcacggtgactcatgcctgtaatcccagcactttgggaggccgaggcaggtggaccacctgaggtcaggaattcaagaccagcctgaccaacatggtgaaaccccatctctactaaaaacacaaaaactagccgagcatggtggtacatgcctataatctctcctactcggctaaggtagtagaattgcttgaacctgggacgctgaggtttcagtgagctgagatcacgccactgcnctccagcctgggtgggtgacagagcaagactccgtct

SEQ ID NO: 101 - DNA, 1322 bp, Homo sapiens
  misc_feature 1204,1205,1206: n = a,c,t, or g
ttttatgactgtgttgtaggtatgtgactggtgtaagcacataagacacacaaaagaatacctggattttggggacggggaaagaaggcttcagttctgcagtgcaaaatgtctcaatcaatacaaaatggacattttctacaaagagacccaggccaatcttccagctgggctgtgcagcacattacaccctcccatggaaaataaagcagaaggcaccggggtgcagctgctcactccagactcttggaatatcccgctaacagatgctcggaggaaggccccctccccggtggctacagctggccaaagccagggccctggcccgtcggcgtccaccaccgtctctccatctgacactgcaactgctctgtcactaaaatccccacgccagtgcccaagtccatccccatcagcgagactccaaatatccctcctgtcttcgtccagccacctgctagcatcgggcctccccttggcgtcccgcctcggagccctcccatggtgatgaccaaccgcgggccggtgccgcttgcccatctttatggagcagcagatcatgcagcagatccgcccgcccttcatccgcgggcctccgcaccatgcctccaaccccaacagccccctgtccaaccccatgcttcccggcatcgggcccccgcccggtggccccagaaacctgggccccactttcagccccatgcaccggcccatgctatcgccccacatccaccccccgagcacccccaccatgcccgggaaccccccaggcctgctgcccccgccgcctccgggcgccccgctgccgagtcttccctttccgccagtgagcatgatgccaaatggcccgatgccggtgccccagatgatgaatttcgggctgccgtcgcttgccccgctggtgccgcccccgaccttgctcgtgccgtactcgtgatcgtgcccctaccggtggccatcccatcccattcctatcccttacgttagcgacttcaagccccccaacgggttctccagcaacggggagaacttcattccgaacgcccctggcgactccgcggcggcgggcggcaagccaagcggacactccctgtgccgccgggactccaagcagggacacgcacgacggagtcattcgacctgaccgtggacgcactggagcccggctgcacagcgtgtatccaccgtgcgctgcacgcgcacnnncaaggcggatcgcgagccgggcgccgcggagcgcaggactgcggcggctgcagggacggccactgcagcccgcccccgccggcgacccaggcccgggcgcgccggcgggccccgag

SEQ ID NO: 102 - DNA, 1908 bp, Homo sapiens
  misc_feature 1721,1723: n = a,c,t, or g
cgcttttttttttttttttttttttttggtattaaatataagtcttagcacctttggcatttttgtccaaacagacttcgacatatgaagtggggacataaccctcttcatcttcatttctccgaatgcgggtccagccatcgcctttgtcttcctctatgacatacaatgtttctccttcaactacggaaatcgttccttcattctgaccttcaaatgtgtagagagctttgcacgtccctatggcagggaggggctcctcatcatcaaactcgtcgtcaaaatccgtggccagcaccttcatctcactctcctgactctgctcctctgtgtaactgccatctgggctctcacggtcctgggcgcagttgttgactgtgggtgggttctggctgtcgtacagtccgctctgccggcgcgcctgctcgttgcgtgctgggagccggccttcaacctcagccagccaggcctcaaatttctgggtctctactcgcagtttctctatattttggctgacttctgctaatttgtgatccaaactggctgggtctcccatctgaggattctttaggtagacatctttcatttttgttatggcatctctttgatccatctccttctgaatttctttatttaactcatcgactttctgctgcagctttttccttctttgttcaggtgggaggttgctgaaatcctccggtgttgcacccttattttttttgatgaacggccataactttcctttggatttgccaccaaatttgaggtctggtttgccttctcctctggaatttgaaaggctgttatctgacacagtgcgcttcattggctgagtgtaatcctcaaattcaatgtctccaggaggctcaaaccctgatttataagcttctattaccagctgtgaatcatttttctgatcaattgattcggctgcttttactattccatccaggcacttcccaatgattgggatcacctgccgatcaacctctgcatatgtcttcatggactctcccattctcacaatcctcctttcctccatctcttgtattttctggaagatgttggggatgtgagtatggtaatattcatgctgctcatggttgaatttctggagaatggatgagtaatctgctttgctgtcctctgccatttggtgacgtatttgagcttgttgtcgggccttttcaacatccgcttttgtgacattgatgtcagcgtccattttctcaaagtactgctgcgccctgtccgcctctttgcaatcgcgttcaaatcgccttttactagattcaagctgcttccagcaagtctcgatgtgctgctgtgctttacggccatcgtgaaagtttgatttcctctcctgtttcagttcctgaacatagcgtgccaagtccacaatgatctgtgatgccatgttctcggagataacttcatgctgccctgcgtaatcattcatatcgttcaggttggaaatgaaagctttacatgacgtatacttgtattcttcttcctccttcgagttctttttaggttggtacttctttgaaagattcctgagttgctttgcatagctgagttcaatctctgtcctttctttcacaaacttgatatatttctcaagaatatcaattccccactgtgtgtgtttttctaagttgtcaaactgatcccagagctcggtgccccagctcatggtgcaggggacgcgaaggggntncgcgcggcgggcgcggctctctggtccccctccccggcgatccctttgccccccgagatccccgcgacggcggaaagcccggagtccgcgcggcctctccggctcgcagctcctcgcccggggtctcctcggcggctcctcctccccgccgctccacagcaaaatggcccgaggaagcagcagcc

SEQ ID NO: 103 - DNA, 1598 bp, Homo sapiens
  misc_feature 1040,1562: n = a,c,t, or g
cttagccctggattccaaggcatttccacttggtgatcagcactgaacacagaggactcaccatggagttggggctgtgctgggttttccttgctgctcttttcgaaggtgtccagtgtgaggcgcagcttgtgcagtctgggggagaattggtgcagcctggagggtccgtgagactctcctgtgaagcctctggattcccccttagaaattacgaaatgaattgggtccgccaggctccagggaaggggctggaatggatttcatacatcagtagcagtggcaattccaaatattacgcagactctgtgaagggtcgcttcgccatctcaagggacgagtccaggaactcactcttcctacatttgagcagcctgagacccgaagacacggctgtctactactgtgccagagacctgagagtagtgaacggaggcttcgacccgtggggccagggaagcctggtcctcgtctcctcagcctccaccaagggcccatcggtcttccccctggcaccctcctccaagagcacctctgggggcacagcggccctgggctgcctggtcaaggactacttccccgaaccggtgacggtgtcgtggaactcaggcgccctgaccagcggcgtgcacaccttcccggctgtcctacagtcctcaggactctactccctcagcagcgtggtgaccgtgccctccagcagcttgggcacccagacctacatctgcaacgtgaatcacaagcccagcaacaccaaggtggacaagagagttgagcccaaatcttgtgacaaaactcacacatgcccaccgtgcccagcacctgaacttctggggggaccgtcagtcttcctcttccccccaaaacccaaggacaccctcatgatctcccggacccctgaggtcacatgcgtggtggtggacgtgagccacgaagaccctgaggtcaagttcaactggtacgtggacggcgtggaggtgcataatgccaagacaaagccgcgggaggagcagtacaacagcacgtaccgtgtggtcagngtcctcaccgtcctgcaccaggactggctgaatggcaaggagtacaagtgcaaggtctccaacaaagccctcccagcccccatcgagaaaaccatctccaaagccaaagggcagccccgagaaccacaggtgtacaccctgcccccatcccgggaggagatgaccaagaaccaggtcagcctgacctgcctggtcaaaggcttctatcccagcgacatcgccgtggagtgggagagcaatgggcagccggagaacaactacaagaccacgcctcccgtgctggactccgacggctccttcttcctctatagcaagctcaccgtggacaagagcaggtggcagcaggggaacgtcttctcatgctccgtgatgcatgaggctctgcacaaccactacacgcagaagagcctctccctgtccccgggtaaatgagtgcgacggccggcaagcccccgctccccgggctctcgcggtcgcacgaggatgcttggcacgtaccccgtctacatacttcccaggcanccagcatggaaataaagcacccaccactgccctggc

SEQ ID NO: 104 - DNA, 1565 bp, Homo sapiens
  misc_feature 1521,1545: n = a,c,t, or g
cccctagagcacagctcctcaccatggactggacctggagcatccttttcttggtggcagcagcaacaggtgcccactcccaggttcaactggtgcagtctggagctgaggtgatgaagcctggggcctcagtgagggtctcctgcaagacttctggttacagttttaccaactacggtgtcacctgggtgcgccaggcccctggacaaggccttgagtggatgggatggatcaacactgacaaaggaaacacaaactatgcacagagactccagggcagagtcaccatgactgcagacacggccacgagcacagcccacatggaactgaggggcctgaaatctgacgacacggccgtttatttctgtacgagagctccgttatatagtacctcgacccaagtccttgactattggggccagggaaccctggtcaccgtctcctcagcctccaccaagggcccatcggtcttccccctggcaccctcctccaagagcacctctgggggcacagcggccctgggctgcctggtcaaggactacttccccgaaccggtgacggtgtcgtggaactcaggcgccctgaccagcggcgtgcacaccttcccggctgtcctacagtcctcaggactctactccctcagcagcgtggtgaccgtgccctccagcagcttgggcacccagacctacatctgcaacgtgaatcacaagcccagcaacaccaaggtggacaagagagttgagcccaaatcttgtgacaaaactcacacatgcccaccgtgcccagcacctgaactcctggggggaccgtcagtcttcctcttccccccaaaacccaaggacaccctcatgatctcccggacccctgaggtcacatgcgtggtggtggacgtgagccacgaagaccctgaggtcaagttcaactggtacgtggacggcgtggaggtgcataatgccaagacaaagccgcgggaggagcagtacaacagcacgtaccgtgtggtcagcgtcctcaccgtcctgcaccaggactggctgaatggcaaggagtacaagtgcaaggtctccaacaaagccctcccagcccccatcgagaaaaccatctccaaagccaaagggcagccccgagaaccacaggtgtacaccctgcccccatcccgggaggagatgaccaagaaccaggtcagcctgacctgcctggtcaaaggcttctatcccagcgacatcgccgtggagtgggagagcaatgggcagccggagaacaactacaagcccacgcctcccgtgctggactccgacggctccttcttcctctatagcaagctcaccgtggacaagagcaggtggcagcaggggaacgtcttctcatgctccgtgatgcatgaggctctgcacaaccactacacgcagaagagcctctccctgtccccgggtaaatgagtgcgacggccggcaagcccccgctccccgggctctcgcggtcgcacgaggatgcttggcacgtaccccgtctacatacttnccaggcacccagcatggaaataangcacccaccactgccctggg

SEQ ID NO: 105 - DNA, 2314 bp, Homo sapiens
aacaacattgttttcttgtgctgtctttcattttctgtaagtaagattgctcttggtcttccattttattctttcaaaatgtggaataagcttttggtttttctctgctgagtgactttacaaaatgaagcgtttggggttcctaataccctttcctgtttcctcatacaggtaccgaagtgagaaggtgacaatcagttacgcagagtatattgcttcccgacagcactgtttccagaacggcactcttcatgccccgcccctctacaatcattactcctgacacacggctgcatgaccagtcccacccccccgtggccaccaatggctatgacatcattggagcagatgcctcctcttcctggtccagttacttctattactgcaccattttatgatgctagcttccgttgccaagtctgcctcccgctgactgagggagggtagggttaccttgaatgaaacagaacttgaggggcccaagccttatctcagcctttcctcaatatggggttccgttggattggggctcctccatgactagtgggaattactgtgggttcagaagacccttgtctggtatttgccacatggggtattggccacacgctggaagctgaaattgatgatccctgaaggttgaacccacacacacccctgcagcctccccagatgaagtaggtgtattcccctggcagtctgggcaacggagaccaagaaacatttttaggttgttttaaattcctttttttaaacttccagtttattgcgtaccaagagttgattacaacctccatgcttcataagcggacgccacgttagggttggacgtgggcaccacgagtcctttgaggctcctggacagagacccacatcaagatcggaagccctttgggtggcgttgcagatctcattgctcagtaggccgtgaagattttcatcctcatcccactctcagttggattttctggcactcttcctgcattgagtctcctgattactgaacagagctccgtcatgtagcctgctgaggaatggaatggaatggagatgcccacaggaggtcctgatgtcatcactgcacgcaggtgtgagaggagagacctcttctgcaccgcctggctacctcactcctctgctggtagcagtgcctatagctggacctaagttctcagaagcgtagatgtgcaaacaagcgattgagttgggctttaggaggacacatcataggagagaatccagggtctgtaagctggttttcttttcaggtgacatcctgaggggcctgtaagcaggggagctcctttttctagtttgcctgtagaggtgggaagactgttggtgtttctgtcctttacaggacattaggaaacagttgtgtaattacacaaggtggacctttatcttgcctgacatgctgggaatcttcaccccaccagggcaaatttccaaatagctcattttattctaggtctttcaaactttcatgtgacatatttccctttcccattgttgctgatttccaaatcgctgtcagcaattttttcctctctccttgcctattcttcactcatttggtggcaaagttcatagaactaggggacttggaagatgctttgaaaatattgttacaaaggcactgctaaaatgattcacagggagagtggccagttggaagaaggatcctaaggatgtgacactggttttcaacaacatgcttagagaactcatgaagtggattgggtgtcaacccagtgaacatgtttttatttaatttattttttgaagtttatgtggtgatggtgtggctttccgaaatgggcaaatattcagaagatcttttgcattttcttctgccaggaatggggaaggggagtgggggcacaatctgagaaaggacacctgtgctgttctaggcatcgctggcaagtttgtgggaagggatgggcaagggtgagtgggtttgctccacaccgtcctgtgctgctcgagaggacctgggacgtgcgagggaaacgtgggtgacggtgcctaggctgcggcccttcactgctgtgctgggttcctgcagcctgctacgtttcccttggcaatgtaaatgaagatggaggggtcgtttcgtgatttcctgctgctgagaataaatgtcttgttaaaaacgtggcaacggttactcttaggtgccatggatcgatgtcagggtggtcagctctggactaagccacccacctccaatttgtacaacagtattgatacatagggctacactcattactgttcaagtgttctatgttaagagttgtgtttaatttct

SEQ ID NO: 106 - DNA, 1259 bp, Homo sapiens
ctgttggagagtgagaaaaatactttcatggaaatctggaagaagagatgggataagttcatagcagatgtggctacaaagtgaggagaagctagccagccctctacaagctgtcttcttgcacacgctgtcacttcctctcactcgttcttgaatcagctccatgtgcccatgaaatcaatggcctctgtatggagcgaccctgtgagaagcacttggctggctgagcaaattcatcctctggaaatattctctctcagccacagtgacattgaccctcttggttttctcctctctctggccatttcttccagtttccctatttcagagtcttctcctctctctgatctctgtgctgtttcctcaggactcagtcctgggctctcttctattctggtctctttatttttttatttttgtattttttcgagatggagttttgctcttgttgcccaggctggagtacaatggtgcgatctcagctcagtgcaacctccgccacccgggttcaggcgaattctcttgcatcagcctcccgagtagttggaattataggcatgtgccaccatacccagcttatttttgcatttttagtagagatggggtttcactatgttggccaggctggtctcgaacacctgacctcgtggtccacccgcctcggcctcccaaagcactgggattacaggcgtgagccacccggcctggcctagaatgacttttaaaagatcaaattaaatcaggtcactcctttgcttacaacgcagtgcgtttagaggtacacccccatgtctccacagggcatacagcatccgatttaatctggatccattccggcgccttcctctcccagtcacccagagggccccaaccccggcggccctttcttcctcaaatgtcctcggctctataccgtgcctgggtcttttctctttctctctgcctggaacattccttctttccccttttgtcttgcccactcctgtttacccttcaagtttcaagttcatgtcactgtctcagagaggttttcctgtgctcgccctgtttctctcaggaagccttgctcttttccatcatgcctctaatcacagcttataatcggatatttatttctgtgtctacagtcttgccctgccagactgtaagccccatgtgggcaggcgctcatgattgtttctgattgtttcacgcatgctgctaacccagagcctgggcccaaagctagttagtactcaataaacaatgcattgaatgag

SEQ ID NO: 107 - DNA, 1990 bp, Homo sapiens
ctacttaggtatttccatttggaatggcaggttcaccacagaggctcacattgagatcaagttgtcttcgacagcctttatagccactgtttgcctcccctgtactccagggttttgttcctgagtcgatgtttgaccgccttctcactgggcctgtagtgcggggagagggagcgagcagaagaggaagaaggcccaaaagtgagatcgccagagcagccgcggccgccgctgctgtggcctccacgtcagggatcaaccctttgctggtgaacagcctgtttgctggaatggacctgacgagccttcagaatctccagaatctccagtcgctccagctggcaggcctcatgggcttcctccaggactggcaacaagctgccaccgccggagatgccgaagaaccctgctgctgtgctgcccctgatgctgccaggaatggcgggcctgcccaacgtgtttggcttgggcgggctgttgaataaccctctgtcagctgctactggaaacaccactactgcttctagtcaaggagaaccggaagacagcacttcaaaaggagaggagaaaggaaatgagaatgaagacgagaacaaagactctgagaaaagcacagatgctgtttcggctgctgactctgcgaatggatctgttggtgctgctactgccccggctggattgccctcaaacccgctagccttcaaccctttcctcctgtccacaatggccccgggcctcttctacccatccatgtttctacctccaggactggggggattgacgctgcctgggttcccagcattggcaggacttcagaatgccgtgggctccagcgaagaaaaggctgctgacaaggctgagggaggaccctttaaagatggagagacccttgaaggcagcgatgccgaggagagcctggataagactgcagagtcctccctcttagaagacgaaatagcacagggtgaagagctagactcacttgatgggggggatgaaatagaaaacaatgaaaatgatgaataaccagtaccagttccagttcaagtgtttaaaacttttgacaagtggtagtcctactgtttacactcacagttaatgttcatacctagttttataagctgttctgtacatagtgtagcaaaaaaaaaagttcaagtcatgttatacaggtgtgtcaaaaggtatcttggtcattaagtattgtgcagtgcattatttattatccctaggagagatgaaatttgagaggtgatcatgtctttttaaggaaacttacataatgctctgctttttttttttttctcttggtaccattggtattataataaagagcaatttgtaactgagtggcactaatggaagaaagtgctgctcaaaggaagtatgaagttatatatttaattttttaattttaatttttaatttttttgctgtgaaggtcaagctgaaatttaccatacatatcatacttgctcatttgtttccctttttgactgtatgggggttcccacactcgtgcatacacacacatccatacactctgacaatctccacgctagtgtgaacgcctctgtcccgaggcgcagcaataataaggcagctgttgaatgtgaagggtccctttggaaaattaacctactgggagggttcttgccagacagaactacagttccattgtctcgtggtcttgtaatgcactggtaaaaacaaaataaatagatgaataaataaagagtgagagaagagagaatcaggtaccttttttaaattaaaggactttgttactttagccacaaagctaaaacagcattacctcagctctaaactagccttgaagtttacagacatgactttgtaaatgtattgtttttctttgttgtgatgtccttttatttttttctttgaaaactgctatcatgtaagataaaatgtaaattgctgccaactgtagtaatgatgcttttaataaaagtgacccatgatatac

SEQ ID NO: 108 - DNA, 1021 bp, Homo sapiens
tttttttttttggtagtcagcaaagttctttattgggtgttaagcccagcaaaccccagatgagccaagcttggacagcacccgcaatgcatctgcccgccctagctgggcgaggtgtgtgccaagctggcccagggaggcagagggctcccttgccaccaccatctcaatcagagcccgcagcggcgagcgactcggcctcagcgaataggcaaaggtggaccaggcagcaggcagcccatatcttgcggccaggtgtcgagtagtgccatgggccatacccccacctggcccaggctcagggtccagcagtacaatcagctcttccagcacctccagctcatccaggaggcgagacaggggttgtgacgccagactggacagttccctgctcaggagtggaagtagtgaggcctccttccatgtgtcccctgtctccagggcgcctggggagaacagatgcgaggaggaaggggtgtgggtgttggggactccgcagaccaagccaggatagggataggggtcggctttctccttggcccagcagaagatgccagagcagaataaacaggaggatcgtctatcacccgccaaggtcaggagcaggaccagcaccacgagcggaaggaaattcggccaggcctgctgagggacaggctcaggggtcctccaggcaatggaacttgctggtgagtgcgctcctgggagctaggggcgcctgggtttccaggtgtgagggggcagtgccccttggcagggaccggcctctctctgcagcgccacggggttctgccccgcccgcggcgggagtaggggtcactccgccgccgcaggggctacatagctccgcgccgtcggggttgcactgcccagaagaacactttcggaacgggggcgttacgaaatcgccgtggtcattgagtccgcagttttcccggaactcatagtccgggcaggggggcggcccgaagcgttgcaggcagctgctgcagcacttgttgtctgggttccagtattcaag

SEQ ID NO: 109 - DNA, 1603 bp, Homo sapiens
ggagccttagccctggattccaaggcctatccacttggtgatcagcactgagcaccgaggattcaccatggaactggggctccgctgggttttccttgttgctattttagaaggtgtccagtgtgaggtgcagctggtggagtctgggggaggcctggtcaagcctggggggtccctgagactcgcctgtgcagggtctggattcgccctaggaacctataccatgacctgggtccgccaggcaccagggaaggggctagagtggctctcatccattactagtggtcgtagaacctacacatattatgcagagtcactgaagggccgcttcaccatctccagagacaacgccaagaactcactgtatctgcaaatgaacagtctgagagccgaggacacggctgcctattactgtgtgagagtcggatatgacagtattagggactactattccggtttggacgtctggggccatgggaccacggtcaccgtctcgtcagcatcccccgccagccccaaggtcttcccgctgagcctctgcagcacccagccagatgggaacgtggtcatcgcctgcctggtccagggcttcttcccccaggagccactcagtgtgacctggagcgaaaggaacagggcgtgaccgccagaaacttcccacccagccaggatgcctccggggacctgtacaccacgagcagccagctgaccctgccggccacacagtgcctagccggcaagtccgtgacatgccacgtgaagcactacacgaatcccagccaggatgtgactgtgccctgcccagttccctcaactccacctaccccatctccctcaactccacctaccccatctccctcatgctgccacccccgactgtcactgcaccgaccggccctcgaggacctgctcttaggttcagaagcgaacctcacgtgcacactgaccggcctgagagatgcctcaggtgtcaccttcacctggacgccctcaagtgggaagagcgctgttcaaggaccacctgagcgtgacctctgtggctgctacagcgtgtccagtgtcctgccgggctgtgccgagccatggaaccatgggaagaccttcacttgcactgctgctaccccgagtccaagaccccgctaaccgccaccctctcaaaatccggaaacacattccggcccgaggtccacctgctgccgccgccgtcggaggagctggccctgaacgagctggtgacgctgacgtgcctggcacgcggcttcagccccaaggacgtgctggttcgctggctgcaggggtcacaggagctgccccgcgagaagtacctgacttgggcatcccggcaggagcccagccagggcaccaccaccttcgctgtgaccagcatactgcgcgtggcagccgaggactggaagaagggggacaccttctcctgcatggtgggccacgaggccctgccgctggccttcacacagaagaccatcgaccgcttggcgggtaaacccacccatgtcaatgtgtctgttgtcatggcggaggtggacggcacctgctactgagccgcccgcctgtccccacccctgaataaactccatgctccccc

SEQ ID NO: 110 - DNA, 1456 bp, Homo sapiens
cgcttttttttttttttttttttttttttttgagacggagtctcactctgtcgcccaggctggagtgcagaggcgcaatctcggctcactgccccttctgcctcccgggttcaagcgattctcctgcctcagcctccccagtagctgggattacaagcgcgcgccaccacgcccagctaatttttgtatttttagtagagacggggtttcaccatcttgggcaggctggtctcaaactcctgacttctcgatccacccgactctgcctcccaaagtgctgggattacaggcgtgagccaccgcgcccggccacatttatttctttttgagacagcctcgctctgtcgcccaggctggagtgtagtggcggacctcagctcactgcagcctccgcctcccgggttcaagcgattttcctgcctcagcctccccagtagctgggattacaggcgcgcaccaccacgcccagctaatttttgtatttttagtagagacggggtttcaccatgttggccaagctggtctcgagctcctgacttcgtgatccgcctgccttggccttccaaagtgctgggattacaagcgtgaaccaccgcgcccagcctgaccttacacttactaggcacaaaaatgaactccaaattcccacgtgggtcttgagcaacctgccgtcacaaccaaggtatcaacgcttcgggaaggtggtgatggaagcctttccccccagtacatttcgttaactgtacaactgactcagtgaccacagggttaataaaacacattgtttttccaggcacttgatactaaatttgggactctttgctgcgggagtttggctggccaggaacttgagtgacattgacctcatggcacctcagccaggggtgtagccaagtaggtaagcactgaactacacccatgcgtgtcttaggagacctagagactgggtgaagcaatgttttctgtcaagtattcatgaaatgtacaaaagaatgtgatgtaaaacccttaactattcctagttaaatgtgttttcagatgttgaaagggatttaagtatctcttaccagtttccctcccatacttttacagttctaatgccacctgtcgtcttatcatctgattgcagacaaatggaatcctgtgctgaacccgaatcttccaaaaaacagcctacaatctgtgaccaccacaagatgtgccctgatggcagctgaagtttgattcagatgggcacttttcttccccttccctgcctagtttccttttgttccttgagtccacgcagaattccattctctggtcagcagacaggcttaagctaaagtattgcctctattctgtaaagttctgtacatagttcccaagcttctgcagggggtgatttttgctcttgtcctgagaaataacagtgctgttttaaaaaacatttgaaataaataccgcacacaaagac

SEQ ID NO: 111 - DNA, 1615 bp, Homo sapiens
ggattccaaggcatttccacttggtgatcagcactgaacacagaggactcaccatggagttggggctgtgctgggttttccttgttgctattttagaaggtgtccggtgtgaggtgcagctggtggactctgggggaggcttggctcagcctggagggtccctgagactctcctgtgaagcctctggattcaccatcgggacctttgaaatcaactgggtccgccaggctccagggaaggggctggaatggatctcatatattaatactaatggttctaccacatattatgcagactctgtgaagggccgattcagcatctccagagacaactccagaaactcggtgtatctgcaattgaacagtctgagagtcggggacacggctatttatttctgctcgagagaaagttattactatgattccagcagtgatttttactctggaggggcctttgatctctggggccaagggacaatggtcaccgtctcctcagcctccaccaagggcccatcggtcttccccctggcaccctcctccaagagcacctctgggggcacagcggccctgggctgcctggtcaaggactacttccccgaaccggtgacggtgtcgtggaactcaggcgccctgaccagcggcgtgcacaccttcccggctgtcctacagtcctcaggactctactccctcagcagcgtggtgaccgtgccctccagcagcttgggcacccagacctacatctgcaacgtgaatcacaagcccagcaacaccaaggtggacaagagagttgagcccaaatcttgtgacaaaactcacacatgcccaccgtgcccagcacctgaacttctggggggaccgtcagtctttctctttcccccaaaacccaaggacacccttatgatcttccggacccctgaggtcacatgcgtggtggtggacgtgagccacgaagaccctgaggtcaagttcaactggtacgtggaccggcgtgaaggtgcataatgccaagacaaagccgcgggaggagcagtacaacagcacgtaccgtgtggtcagcgtcctcaccgtcatgcaccaggactggctgaatggcaaggagtacaagtgcaaggtctccaacaaagccctcccagcccccatcgagaaaaccatctccaaagccaaagggcagccccgagaaccacaggtgtacaccctgcccccatcccgggaggagatgaccaagaaccaggtcagcctgacctgcctggtcaaaggcttctatcccagcgacatcgccgtggagtgggagagcaatgggcagccggagaacaactacaagaccacgcctcccgtgctggactccgacggctccttcttcctctatagcaagctcaccgtggacaagagcaggtggcagcaggggaacgtcttctcatgctccgtgatgcatgaggctctgcacaaccactacacgcagaagagcctctccctgtccccgggtaaatgagtgcgacggccggcaagcccccgctccccgggctctcgcggtcgcacgaggatgcttggcacgtaccccgtctacatacttcccaggcacccagcatggaaataaagcacccaccactgccctgtgg

SEQ ID NO: 112 - DNA, 621 bp, Homo sapiens
tcccagcctccccagagcaacacgtggaggtggataaggctgtggcacagaacatggactctgtgtttaaggagctcttgggaaagacctctgtccgccagggccttgggccagcatctaccacctctcccagtcctgggccccgaagcccaaaggccccgcccagcagccgcctgggcaggaacaaaggcttctcccggggccctggggccccagcctcaccctcagcttcccacccccagggcctagacacgacccccaagccacactgaggtgccgctgctggagatgcgtgcccccggcggctacccgctggaccggccactctccccagcccccttgcttctctccagccctgtccagcaagtgcagggtgcctgcacttaccctgtgcagagaggtgggatggggccgtgcacacagggatgcccgctccacatcctgcctgcccctcagccctggcccaggccccttttggaggcagctgaggaaggatgctggggaaagccctcttctgcagctttgtggaaggctgatcagtggctgctgggtggcgggtacccttgctcagatgcctggcagggctgggtggcgattcataaagacctcgtgttgattccc

SEQ ID NO: 113 - DNA, 1331 bp, Homo sapiens
gccccgtctctactaaaaatacaaaaattagctgggcgtgatggcgggtggctacttgggaggctgaggcaggagaatcacctgaaccaggaggtggaggttgcagtgagccatgatcctgccactgcactccagccagggcgacagagcgaatctccatctcaaaaaaagagagtagggaggaaaggcctgggctgggcccttcacaggctctcatcctgtgaggccggagctcagcccagccccaggaggggaattgggaggctcggagcctgggtgtggatgggcccagggccacagggccaggaaggatgaaggctgtggcctttgcttgaggaggcatttctcttggaaggaggtgggcccgggggttctgtgcatgcaggactagaggaggggcaggggcgggcaggagctggggtcaaggacccctcctcccctctgtatgagtggctctggctggccccaggcccaggctggtgggaaacccctcccagccctcactggccccttcttccacaggaaggccaggcccctgaccccagccctgccccaggcccacccacagctgcagactctcaacagccccctggtgggagttccccctcggaggaaccacccccaagcccaggggaggaggctgggctgcaacggttccaggacacaagtcagtacgtgtgtgcagagctgcaggccctggaacaggagcagaggcagatagatgggcgggcggctgaggtggagatgcagctgaggagcctcatggagtcaggtgccaacaagctgcaggaggaggtgctgatccaggagtggttcaccctggtcaacaagaagaacgctctcatccggaggcaggaccagctgcagctgctcatggaggagcaggacttggagcgaaggttcgagctgctgagccgcgagctgcgggccatgctggccatcgaagactggcagaaaacgtccgctcagcagcaccgagagcagctcctactggaggagctggtgtcgctggtgaaccagcgcgatgagctagtccgggacctggaccacaaggagcggatcgccctggaggaggacgagcgcctggagcgcggcctggaacagcggcgccgcaagctgagccggcagttgagccggcgggagcgctgcgtgctgagctgaggccgccggcccgggtggcccataacttctcgcgtccccggcgtccgccgccgccccgggcctgcgctgcggacgacccggccgtcccggaggccgcgcgcgtgtccgctaggggccgccggcgcccttccccgtacagggcagggcggatccccgaccccacgggcggg

SEQ ID NO: 114 - DNA, 1590 bp, Homo sapiens
  misc_feature 1555: n = a,c,t, or g
tggattccaaggcatttccacgtggtgatcagcactgaacacagaggactcatcatggagttggggctgtgctgggttttccttgttgctattttagaaggtgtccagtgtgaggtggaactggttgagtctgggggaggcttggtgcagcccggggggtccctgagactctcctgtgaagcctctggattcacctttagtgactcttctatcaactgggtccgccaggctccagggaaggggctggagtggatatcatccattagtcctactagttataccattcactacgcagactctgtgaagggccgattcatcatctcgagagacaatgccaagaactcagtggatctccaaatgaacagcctgagagacggggacacggctgtttattactgtgcgagagtgctcttcgagaacttctttgatgcctttgatttcaggggccaaggaactatggtcaccgtctcttcagcctccaccaagggcccatcggtcttcccctggcaccctcctccaagagcacctctgggggcacagcggccctgggctgcctggtcaaggactacatccccgaaccggtgacgtgtcgtggaactcaggcgccctgaccagcggcgtgcacacctttccggctgtcctacagtcctcaggactctactccctcagcagcgtggtgaccgtgccctccagcagcttgggcacccagacctacatctgcaacgtgaatcacaagcccagcaacaccaaggtggacaagagagttgagcccaaatcttgtgacaaaactcacacatgcccaccgtgcccagcacctgaactcctggggggaccgtcagtcttcctcttccccccaaaacccaaggacaccctcatgatctcccggacccctgaggtcacatgcgtggtggtggacgtgagccacgaagaccctgaggtcaagttcaactggtacgtggacggcgtgaaggtgcataatgccaagacaaagccgcgggaggagcagtacaacagcacgtaccgtgtggtcagcgtcctcaccgtcctgcaccaggactggctgaatggcaaggagtacaagtgcaaggtctccaacaaagccctcccagcccccatcgagaaaaccatctccaaagccaaagggcagccccgagaaccacaggtgtacaccctgcccccatcccgggaggagatgaccaagaaccaggtcagcctgacctgcctggtcaaaggcttctatcccagcgacatcgccgtggagtgggagagcaatgggcagccggagaacaactacaagaccacgcctcccgtgctggactccgacggctccttcttcctctatagcaagctcaccgtggacaagagcaggtggcagcaggggaacgtcttctcatgctccgtgatgcatgaggctctgcacaaccactacacgcagaagagcctctccctgtccccgggtaaatgagtgcgacggccggcaagcccccgctccccgggtctcgcggtcgcacgaggatgcttggcacgtaccccgtctacatacttcccaggcacncagcatggaaataaagcacccaccactgccctggg

SEQ ID NO: 115 - DNA, 2410 bp, Homo sapiens
  misc_feature 2196,2203,2205,2212,2234,2253,2270: n = a,c,t, or g
accttagtgacttaggaaaaaataaaacttgaaagtaagattcctgttaaggctttaaactgatgattatcattcatgtatttttttttcctctctccttacttccctggctatttattcaagacattctattctacactaaacatttaatttgaaacatgtggttcttggaaaatatgccgtcttccatgtttataattaatgctgacataattaatgacctcaaaattcaagaaagccttttacttttgagcatatccatgccatctttaaatacgcacactgtactctctggtatactatgctgctcaaatgtttttatccggtcagtaattagtttaatttggctttgcaaaaaaattcacctttgaagtcatatattaacattaaaaaccatactacttcaaatgtacaatgcctatcatttttgcatcacacatgtgaaatacatgaactgacctcacctattcctttttcaaaataaccaccacttcaactgtgtaacactcagttaaaacaacagcaattcaaataatcaagaacatttcttgggaaagggagagttggggcacagatcttatgaaagaaggctagttcgtttgaaatttttaaaaaatgtcatctgatactcaaagtatggatcagtaattcacttttttcctttcaaataacttattaaagcatatatatggtgaaaggaaatattaaaccaaacaccaatggtaaagaaatagaacactattagtaacttgtagcccctctatgtgcctatttcaagcttacaactttcaccctaataaccactaccttgaattttgttaaccactccctttcctatcatatttgcacatatccttaattaaatgtgtcaccctaccacaacgtgctttttaactcaacacttctgtgacttatccacattaatccaagttcttttctctttttcacggctgattcaattgtacgaatacccacaatttatggagacatttgcgttgtttccaatatcctgttagcacgaatgctggtatataaacttttctgtacaaggatcctggggtacctgtgcaaggatttctctaggcattacagctagggtataaagcttagggaggaattgctgggtcggtttcaactttcctagataatctcaagttcttttctaagtcaatgaactgaaattcacttctaaacttagcaatactgtcacacgcgaagcaaacattccacctctcatcctctaaacaatgagataaaatattttccttcctaataaggtataaatcaaaataattttgtaaaaagtggcaactgaagtgcttgagactagtaaatccagcagttgtggatctgaaccacaaaagacaaaaacgtttggagaaaatatcgttaacagagcgcctactacagtgagactattacatccattatctcttaattcctgacaacacagcaaagtaaaggcaattatcacgttcctcagaggaaacaggctcacaaaaggtaggatcttgaccaaggtcacacacacacatatcaagtggcgtcacgtaactctttggggaagcgggggggtcgggggagacggagtttcgctcttgccacgggctggagtgcaatggcgcgatctcggctcactgcaacctcctccccccgggttcaagcgattctcctgccttggcctcccgagtagctgggattacaggcatgcgccaccaagccaggctaatttttgttatttttagtagaaacgggatttctccatgttgatcaggctggtctcgaactcctgacctccggtgatccgcccgcctcggcctcccaaatcgctgggattacaggcatgaggcaccacgcccggtccacaataccaagaactttctagcgaggcagaatagttgacgctgcagtccaattagagaaaaaaggctgaaatattaagattaaaactaaagtaacgacccaaaaacccatccttcccccaaacacggtcatttagatggcaagcaactccactgctttacatcccaatgcatttcctccgacttaaaatataactgaagagaattaaaatctatttctaaaaatgagaagttggtcttttcgtctcccgtgccttaaacagtaactctagggagagaacgtcaagggtgccatttcgtgtaaggctttcttgggatgaagtgttctctcagnaagatcngngtttttnagatgaacgccgaggcttgaanacatcgaacagcccgcctnaagcggcctggctcganagccgggaaaccaggcgaggcgccaaagcccgggcttgggctgatgcggtcagcccgcccctcccgatcccccgcggggctgggatggggccgggccgcgccacgacggccgtccgcacggagaggcccagcgtcgccaa

SEQ ID NO: 116 - DNA, 984 bp, Homo sapiens
  misc_feature 158,189,782,939,960: n = a,c,t, or g
ggctatcttggggcactccaggccaggagtttgaaaccagcttgtgcaatgaagtgagaccctagctctaaaaaaataaaatagaaacaaattagccaggtgtggtggtgcacacctgtagtcccagccactcaggaggttgaggcaggaggatcgcntgagcccaggatgcggagattgcagtgagcngagatcgtgccactgcactccagtgtgggtgacagagcaagagcctgtctctttaaaacaaaacaaaaatgccacctttggggagaaactttgaggccatgccaatatcccacatcccgcttttcctcaaacttccacccactaattttaccatccattggtggccggggcttgtctacagcagttactgctgtgctgtttccctgatggcaggtttttgtgtgcctcctcattccatctacatttattaattggaactcttctgtgaaggaagacctgtcccttcccccttatttctttatttagttactaatttatatcctaatgggctcatagatacttgttttaatctagcacattcctttttcatgtgataaaagctcccaagttccaagtaaattcctagcattgcctctcacacagcaggaagaacggcacttttcctacgtggtaaccagggccttagggaacttggaaagaacatgaacaggtttcgtttgttcattcatttattttccttcactcagcaaatatgcatttgagcacctactatctgcttctaggcactagggattcgggaatgaaaaaacaanctccttaccttaggggaacggacatcctactggagaataaaacagtaaacagataaaaagtgaatatggggctgggcacggtggctcacacctgtaatcccaacacctttgggaggccaaggtgggcgggtcacttgcggtcaggagttcaagaccngcctggccaacatggtggccntctctactaaaccccgtctcttat

SEQ ID NO: 117 - DNA, 1048 bp, Homo sapiens
tgaaatcactggtgtttattggctgtgattccatccggagagaacacacgcaggggccccgacatgcaggaggaggcgcaggcgcaggacagacggacagaggacaccacggtctaagctaagctcgcggcccggggcgccatgcgctgggaacggggtgcgcaggttctacgagaggacgccctgtctgctcagagctggctttgtaaggtgtgaaaacaggagtttttaaaagacacgacccgggagaagtcagtgagagggcacagggcgagcaggacggacagcgacgtccccgcgggccgcgtcgctggggcgcagaggggcgcggtggtctctgcccggagggcgtcggtcgttagtattgcagtctaacgttatggcttctctaaagctatgtaaggtcatgaaggtcaatgccaagccacgccctggcccgaaacacgtggagacttgatgcatttttgatgtggacgaaagggcccgggggcgaggcggcgcctgtcaagataaaactcattaaatgcaaagacctcatttacctgagattcaacaaattgtgatgcaaattaaacatgaatggaggagaaacaggggctcggatgccgccccgcaggccaccaggtggattaggccacacacgcgccactgcgcgcagggaaccccgcaggccccacccgaggagctgcccacggaggaggtgctgggcaggggcgcagggtctccagcgtccggtgcctcgggcctctgcggctcctgtggagggtgcagtgttcaatggccgagggcaggggtcctccccagggagaagcagcagccgcgtgggcggagaggctaggaggccgggcggggggcgaggacttgggaagagcggggtgacgggggtgggggctgggcgtcccccaaacctattgctttgtttcctttagtttagaagtgaacacggccgtggcgttcgtaagaagcaaaaccttccagagaggagaggaaaggacgcggacagagacggatggacaggggcccgagggggccaggccgggggcggaga

SEQ ID NO: 118 - DNA, 1965 bp, Homo sapiens
cctgaaccacttgtgccctgccctgcctcagtggctctggacaggcagcatcatgaaacggagaactgaggggtagggggattttagtccagatattgtgaagctgtctgaacctattaataccatttaccaatccttacttgatgaaaggaccacaaggagacggaagatgtcagaaattagtagtatgtatctgggaaattatccttaatctttcacataaaatgcgaacaccagggggttagagttgcactttctctgtcagtgtattggtacacttgttattaagtcatgtcaatagccagtaaagggaaacatctcaactaggcacatcccattttaatgtctctgtatttttccctctccccacctctatttccacctcatcttctaatttttacaaatgttcccaatgtttgggaagtgagttcagtttgggagagagacaggatatatctgcacatttacttctgatttggacatatggttggcatccttcctgtgcccttgagtcttttcttagaaatgttaaatttttaaaaacttgtttatttttgaacgttgcttttttagaatcacccttcctaaaagggagagaggaaaaactgtaagtgaatcttattagatttttgaagtgctcatcataattgaactatttccctaatgactggtagcatctcacctagatttgtccttggaatggttcctgaacgtttcaagatcttccagttccactttacttttggctgtggttggaaacatgggtgttcatttctgtaattgttaatctggatattctgaggaagaaaaatatggaatatccctttaatcactgaactttatttctgaccctttatgtttcctaaagagtaaatatacaattttcaaaggaaggaaacaacagtagctattaacatgtagaatccatctggcactgtatagataaaaacaagcccagaacgctttttgtttattcttcaccacagtgccacgaactgggtcaggattatccttgttttacaaatgaggcagccagagccagagaggtgaagccagcctttctcagagccacacatccaggaagggtcagagcccagatgaggtgggagaattgagaacaggtctgcccagttactacccagcccagacttccaccgcatcttgcaaggatcagggtatgtaggacaaatgtcagcccaatgggtcatttgttcccggggacccagtttgaccccctggtacctaacggagtgccaggagcatgacaggcactcagtaaatatttgttaaatgaatgtattgtcaaagtcaaagaattcactaaaatgtgtcatctcatcctggggactgcccttggccactgctgaatctgttttgaaacctctttgcaggcgagtttaggaatatatgaatatatttatttaaaataacattaccagaatttgcgacatgtgccagtgtggttgaggcctctggtggctaaggtcttcagcaaattagagatgcacagtagaggtgctatgtgtatactttctctttgatttaaacttatttaaataacttttttttcctgactttaaaattttacttgtagaaaatttggtaagctataaagaagaaaatgaaaatatctcttaatcacaccatattgagatagcaatgttaagatgtatttaaactagggtcgggcacggtgactcaacacctgtaatcccagcactttgggaggccgaggcgggcggatcacctgaggtcaggagtttgagaccagcctggccaacatgatgaaacgccgtctctactaaaaatacaaaaattagctggacatggtggcacatgcctgtagtcccagctactcaggagactgaggcaggagaatcacttgcacctgggaggcggaggttgcagtgagccaagatcgtgccactgcactccagcctcgccaacagagtgagactccatctc

SEQ ID NO: 119 - DNA, 574 bp, Homo sapiens
gttaagtttagctgcatatactctaaaacaaaattgaaaaacaactggcttgtgtaaaagagttcccatcccaaagatgggaggttcccagcctggagctgggaaggctggaggctgggatgccgggcttctaactctatgctgtgttctatgttgtgtgccattttcaacacatggcccctgcctcacagcacaaggtggctgcttgagctgcagccattatgtctgcatttcagccagcaggacagaaaaggggatgaagaacatgcccctccttttgaaaacatttagggccaggtgtggtggctcacgcctgtaatcccagcgctttgggaggccaaggcgggtggatcacctgaggtcgggagttcgagaccagcctgagcaacatggagaaacccctgtctctactaaaaatacaaaattagctgggtgtggtggcgcatgcctgtaatcccagctactcgagaggctgagccaggagagttgcttgaacctgggaggtggaggttgcggtgagccgagatcgtgccattgccctccagccttggcaacaagtgtgaaactccgtcac

SEQ ID NO: 120 - DNA, 1334 bp, Homo sapiens
  misc_feature 641: n = a,c,t, or g
caacttctgtagtcatctattcttgagccttgaccttggttatttgttctggtgttctgtgattctgttaattttttctgtcatctcttttgttagggccctcctcctttctagggtcccgatgacaccttcgtgattctcagtgctaccctagtcacagcctatcaaaggtagaaaaactatagtttttcttcagtgtttattcaattctttctactctcactccccttttgtattttccttctgactcatgcctgccaagctgttttggcctctgacaacagttgttctctcatcaattatggtgctccaagtattcatcacttcatgcctgctgatgtctgttcacaaatattcagattttttttacgtgtccagcctgcttcctcttgttttaagtgtcaagtgtctttctgtcattccttttttctctgtcttacatccctgtgtatcacatccattcagatcttttacttccctcatctctgcaccccagtaattctttgtcataatttcttagaagtatagtcaagaggagactttcagagagctgttaattttatccctttatttaacagataaggacattgtaatccatggggagaaagtgacttacccaatgttgtaaaattcatttaggngtaggtcttgagtcccagaatatagtctctccatttccttaaacctttcctgtcattcctgtcttcaaggacccgcttggtaaacacctccatgagcttcctgtagactccagaaattagtggtgtagtgtgctagtgtggaagggggaaggggagaaggttgttatagaacacagtctatgacatcttttcctaaatctttttacctgtggttataatttgtttatatcttctggctctactattctaatttgatgcgttgcttaaaggtcatcattaaatataggtaggaatgcagtcattgagcacacactagacaccttttctgtgtctagctttgtattgggcactgagaataaagacatgacccctgtagtagcttttacctcaaagagttcacaacctagtggttgagacagatccatcaagaaatacagtatgttcactttgggaggccgaggcaggcggatcatgaggtcaggagatcgagaccaccttggttaacatggtgaaaccccgtctctactaaaaaaatacaaaaaaattagccaggcgtggtggcaggcgcctgtagtcccggctactcaggaggctgaggcaggagaatggcatgaaccagggaggcagagcttgcagtgagccaagatcgcgccaccacactccagcctgggcgacagagcgagactccatctc

SEQ ID NO: 121 - DNA, 989 bp, Homo sapiens
gtcctcttggatcagtcactgtggccatgcatgtttggccacatgattaatccagtctgggtcatgaccttttcttcatccaaaacaaggtggtgggaagacaaaaacaatagctactacaaacaataggagtttataattatgtgctgatgtattcgaagatgtgttgacagtcgtgagtgtgtatcctaggaaaggcgagctggactctgtctccatggtggctctcaccccagggacctaggaacagcctgtcaccacacaattacttttataaccctggagatgaaaatctccttgtcctcaaaatacttccagaagaacaaccagatgggaaggaccttggttgggactctttccagttcacttggggcagagggaatttaatggctcacgtagctgaaaaggatgggctagattgggcttcaggctgcatcccaggactccaaacagggatctgtctctttggctctcagctctgctttcatttgagttggctttattcttgggcttcacagtgtggccccacagcaccagttattgataaaaagagctcccctttgctgacagaactgctggatttggttctcattggtccagacgaggaaggtatccagcctcaagtcatcattgtggccaggaagatggaatacaccaaatggacaggcctggcatgtacccacagagactgagagttggtgctggtggttgtggtggcagatgatattacctgaagaagggacgaatgggtgctgggcaggacaaagcatcagctgtccagttcaggcctctcctctttccctggtgtcttcattttcctccgtctccctgctgtcccttaccctctgcccaatctctcattactcctggtcttgggagttgccttctgaggatactccactgggggtacctgagcctggattagagggcagggggaggatattgcctagccaaagtgggtgttcaataaagaaccatttggagatggc

SEQ ID NO: 122 - DNA, 2085 bp, Homo sapiens
  misc_feature 728: n = a,c,t, or g
cactcttctctcctgctgcttgctgtccttatgaggcagctggcaccacaagggaacatctggggctggccctggccctgaaagtgcccttcttcatcgtggtcagcaagatcgacctatgtgccaagaccacagtggagaggacagtacgccagctggagcgggtcctcaagcagcctggctgccacaaggtccccatgctggtcacctctgaggatgatgccgtcactgctgcccagcagtttgctcagtcacccaatgtcacccccatcttcacattgtccagtgtgtctggagagagtctggacctcctcaaagtctttctgaatattctgccgccactcaccaacagcaaagagcaggaggaactcatgcagcagctgacggagttccaggtggatgaaatctacacagtaccagaggtggggactgttgttggaggaacactttccagtgggatttgccgtgagggggaccagctggtggtgggccccacggatgatggctgcttcctggagctgagagtatgcagcatccagcgcaaccgctctgcctgtcgtgtgctgcgagctggtcaggctgctacactggcgcttggggactttgaccgtgcactgcttcgcaagggcatggtgatggtgagcccggagatgaatcctaccatctgctcggtgtttgaggcagagatagtcttactgttccatgccaccaccttccgacgaggattncaggtgacaatacacgtgggcaacgtacgtcagacggcagtggtggaaaagatccatgccaaggacaaactgcggacaggcgagaaggcagtggtacgtttccgcttcctgaaacacccagagtacctgaaggtgggcgccaaactgctgttccggagggtgtcaccaagggcatcggccatgtcactgatgtacaagccattacagcaggagaagcccaggccaacatgggcttctgaacccttcaggcagggacagttctattgctgtccctacaatatataaggtgacttctggccatgctgccctgccattggcggctctgtgtgttaataggctagggagagaggggtgctgtctgccacttgctccctgccaactttctggagaggtgccaaacttggtgtggccaggaaagggcagtcctgagggagaagacaggattcagggcagtgctccgaagctgtgtgctcacctggttggctcatcaaacctggcaaccctgtggcctgtctgccggagctgactggatccactcatcaattcttcgtccccactactaagactgggcatgttttgctggtgtggtctctgcacttcaggaatggtcacaacagggggtagccctcaaaagcactcctttttctatacctcttctcaaggccatgtaagttgcccatctctacctggctgtggacaaaaggttatctgctcttggccatctggtggtggtggcggcccagagtctgaagaaatggcacagggacagtgaatggtagtgttgccaccctgtgctgaggcctgaggcctcttcctcagctttatctccctttccttcactcaagggccatttccccagtccctatctcccccatcccctcccggcttataggccccacaggtgctatttgttgtgctggcccaggcgtggggctaccaagcaaaggcttggcatataccaaaggccagctgcatgcccatcagtctggtctttttcctctgcggtcatgttggctttcatgctggatcaaatgttttactttcccagactggtggcatgtgagttccccatcctaccactctcaccccactttcctgccccacctaaaccctcgttttagtaatttgtagtgactgttcccttccctctgttgcagggaaccaggaggaaagggaaagatgttgccatatttcctactctttaggcatggactctcctttccctttgttagtgtcctgggttcccatggactcagggatttgttggctaaggtttctctgtgcatatatatatatatacatatgtatatatatttaaatacacatatatattgtacagaataaaaatgttttattg

SEQ ID NO: 123 - DNA, 1816 bp, Homo sapiens
gtcctcccaaagtgctgggattacaggcatgagccactgtgcctggccgaagaaatattttcttgctattgctaatctctgggttacctcgctatcccccatttagcttcacttctcctccatcacctgtatgaggaattccctctgtgttaaatatctggagaagtttcctgattggaccctggctgttgcagcttccaaggccacctctctttgtggctggtatccttttcccatgcatcttctccaggacttccattctgcagttatctctctgaactcagtgtcttcttcccatcagtataggggtggactttagtatctcctatgtttaggcaacatctctcctttgactctgcgtcttctccagtggttgcccttctctgctcctcttcacaataacacctcctgaaagggccacccatgcctgccccctcctttcctcaccccctctgtggctggacttctgttcctacactccaccctggttgacaaagtcactgattacttctctattttcagcttacttgatccttaattgccttcaaaaacagctaactgggccatgcatgtaatcccagcacttcgggaggccaaggcaggaggatcacttgagcccaggagttcaggaccagcctgcctgggcaacatagtgagaccctatctacaaaaaatagaaaaattagccgggcgttgtgactcatgcttgtggtcccagctacaaaggaagctgaggtgggaggatggcttgagtccgggagggtgaggctgcagtgagccatgatcacgccactgcactccagcctgggcaacagagcaagactctgcctccaaaaataaaaattaaaatgatttcttaagtaaatttcaaatatagaatgtatatgctagtgataacaaaattaacactgtttatgcaagtctgcaataggtagatgtgaagttgataggtgcaataagtataggcaaacacataggaacatttgacctgtttttttgttgattttaaaacattgaataattgggaagcttttaaatctcttaatttgagcaactagatggctgtatttatctccttatattaaaaaaactattataattatctttcccacatatcaaactccactggtttttttcccatttttctttcatacttcagaaagacgagaatccaggacttgaatcgtatcttcccactttctgaggactactctggatcaggcttcggctccggctccggctctggatcaggatctgggagtggcttcctaacggaaatggaacaggattaccaactagtagacgaaagtgatgctttccatgacaaccttaggtctcttgacaggaatctgccctcagacagccaggacttgggtcaacatggattagaagaggattttatgttataaaagaggattttcccaccttgacaccaggcaatgtagttagcatattttatgtaccatggttatatgattaatcttgggacaaagaattttatagaaatttttaaacatctgaaaaagaagcttaagttttatcatccttttttttctcatgaattcttaaaggattatgctttaatgctgttatctatcttattgttcttgaaaatacctgcattttttggtatcatgttcaaccaacatcattatgaaattaattagattcccatggccataaaatggctttaaagaatatatatatatttttaaagtagcttgagaagcaaattggcaggtaatatttcatacctaaattaagactctgacttggattgtgaattataatgatatgcccctttcttataaaaaac

SEQ ID NO: 124 - DNA, 2222 bp, Homo sapiens
gtcatttcagtttccatctccccagcgggggctccctgggtgaaaggccacagtattttgggttggtaggcaaattgcaacattctggacatggcctgaggaaggcctcttcttataagattctcagaccaaattctagaccaaagacacaggcagaccaagtccccaggccccgcctggaaggaagtcgttcctcaactctccccaaggcacctgtctccaatcagagccctctcgcccagccagccctggctctgtgtgcagagcatagctctgcgagtacctgtgtaataatgctcaaccttcatgtctccgtataaacgaaactttccatgagagctcatgactctggtccatctgtctatagagaatgggcaaagtccttcacctgctttctgcttgggatgggtcagaaatgctgatgcccgcacatagcccagccagccagatctggaaaggaagcgagggggttgtttaaatcaattttttaagatgaagaagtgggagacactgcgttgagatgggccatgctagggccacagagatttcctgacggtcagggagagaagggcctccagggtcccctaacccaacgcccttgttgtaaatgaggtaactgaggctcagggaggcactgtgagccaggaatggattttcttgaaacagctctagctgcaggttctccgaggtaggtgcagggaatggtgagtgtctaaccagggctacatccagcaacatcctcaaggtcttcctgacaaccaaagacaagcctttatggaaaaggaaatgcgctcccctccatgttcagggatgaggggagcagcagcagccacactcccaccatcctcacagaattcctggacccatgcggtggctccgtgagctgggtgactccagcctcacctgcacaccccagccctgcacggggccctccttcctcccagcagcccttggtgagctaggaattgagatccctgtttgtgaaagagggaactgaggtgcagagaagccagaggtgtgccagttccttaggcagaatttagatgaagtcgccttggctccagactgaccctgaggctctgcggggagtttccaggcagcagaaagtggccttggatgctatccttccaggacagcataacccctgggccatgtgcagctccttcactgccccatggatccccagcatacccccaaagccagtggggaaacacaaggggagagcacagcatggcccctccagcccacttcagggcactcttgtatcacccgggtaccgccacactggtcccccacccagccagcatctcccagcacagcccctctccctggggaaatgctctgggtagccagtctaaaggcagaggcacctaactgctccccgcagcccaccccacccaagattcagacacaagccaggaaaggacccaagagaaaatccttcaaggtggcctgaggtcccatccctccctcagacccatgtggtcccaggccaggctgcctgggacacggtaaataccactgtgtgcaaaaatcgaagtacaaaaccacaagactaaacaaaacaaacccagagagccaaacttgtagaggtgggcagtccagaaagcagggggcagccctccccctttccttctctccctgatcctcagaatatatattgttgtaataggaagcatttttgcattgttctcttgtgggtgtcactacagacatgttctggcgtgttctccgagggatggagcatcctgttatatatttgacttcaaattgagatgttggcttcattttttttttttacccaattaatctcccaatccctagcaactgtgactctgtatttagcacaagagaaagctgagaatgtgggtcttgcctccttccagaaatatgtctggctcatcaggacatttttttaaaacttcaaaatatttttaagatattttaaacttttataaaaaaaaaatcaaccaacaagagacttttctgaggaggaacatttgtatttgaacaagatccttggtgtgtagttcagtcttgcagtatacaagcttttgtgtataaatgttttatgatatgattccctgtattttgcaggggtttttttctcttttgctttttagataaatatgtatatcaatattttaaattcatctttgctttttttagaggagtttgtaatcaccttataacatgaaaataaacatttcctttttaacacc

SEQ ID NO: 125 - DNA, 1252 bp, Homo sapiens
gggctcctccatggtgctgcattgagtccagctttccttctgcccttcctccaggagaaggggcccaaggtccccgtggatggtctccacctgtgcttggaaccagtgtaactggctgctccctgctcccagggactgacacggggatcatctctgtgaccgccctccgtcgggcccctgcctgccttctcccctccacgcaaggctgtgctcttcctctggtttctgtgtgtccgtttgagtgtctgcgccccgcctccccatacttcctgggatgatgtgtgaaacctgacacctagatttatttggaaatattctatgaccactttacagatgaggaaactgaggcctcaagcgtggaggggtagagtgaagagtagaacccaggtctgatgccaaagctgctttcttctctgcctcctcctcacgcaactcacacctccttttcttctagctttgttgtcctcccaggaaccaaaaaaccccagctattttctgaccaaaatgtgtttcataacaaaccatctggtgcctttccacacagaactggcaggagcctcgtgtcctgctagctgtctctcttgttgatttccgtgaaaatgcaagtgtttgaagtctgctcattccgagggtgaaacaaaatccaaccctgtcagaatcatgctgttctctttgctgacactgtgaccctgggtcgggacagaccagcagcaatctgtctttagaatcgctttccttcctccccttttgcccccgtggggctcccggcatcctgaaagccagcaaagcctccagcatcttttccatcctgaggtgcctcccagtggcctggcttgtcggagcaagtttcatcagccctagggaaaacacggccctcctgggaacctccttacctggagtaaccggacaccttagacggaggtgcctgagggtggggtgggatttgcagggtcattatcagaacatgaggataacttccttgcccctgctctgtagccacctccttggcaccggcctctatttgtcataaggcggcgtgggcgaggcctgacacaggccagccttggcacgaggggggccaggggttctgagaagcgctgccctgtgagagccacgctggccttcgtctccatctctggttgacgggctgtccgtgtgcctcctgtgtgtctgcagacaagtcttgctgtgctttatttgtgaaactttaatgaggaaaaaacaaataataaatgttctcgttttgaaactc

SEQ ID NO: 126 - DNA, 981 bp, Homo sapiens
ggcacggtgtcagcaggcaacatggccgagaggccggggcctccgggcggcgccgtgtccgcgaccgcgtaccctgacacccccgcggaattccctccgcacctccaggcgggtgcgatgcggcgccgcttttggggcgtattcaactgtctgtgcgccggcgcgttcggggccctggccgccgcctccgccaagctggccttcggcagcgaggtgagcatgggtttatgcgtcttaggcattattgtgatggcgagcaccaattctctgatgtggaccttctttagccggggcctcagtttctccatgtcttcagccattgcatctgtcacagtgactttttcaaatatcctcagctcggccttcctgggctatgtgctgtatggagagtgccaggaggtcttgtggtggggaggagtgttccttattctctgcggactcaccctaatccacaggaagctcccacccacctggaagccccttccacacaagcagcagtagcaccacttggctagacggaccagctggaaagatcatgatggtggcccagccttgggatgtcatgtgggactgtgtcctagggcgatccagttgtgcagccttctgaccatcagccaagggaagcaggcctctgatggagcaggctctggctctgtaaggagaggtgcagctgcagcagtgttctaccggaagtgttttgatcatctgtacagtgctttggattcttcctcccaggcctaccccagtgagccttcgcagatgctggagatcctggggttggtctgctttgtgtatggtacttgaaaccacgctgtaattattgtcctgttgccaaacaaaagccagtcatgtaactctagaagcagtgactggtggggctttctgacagttccatgctgatgtatcaggccatctgtgtcatgcttatgtattatggcaagaagaggaaaactggattaataaatacgttttttgtaagct

SEQ ID NO: 127 - DNA, 1343 bp, Homo sapiens
gcttttcttaaatatttatttttttcaacatgctttcaacctgtcaacaaaaacaaaacacacaaaaaaagggcagtgtttgaagattgttgatttttttctggggataatctatattatattgacttcctattacttattataaacctgtgtttgtattggagatgtgtctactattgggggaagaggttctcgtaatcgctcggtgggaaatcatggctctgccgtcctgcctctctgtggccgtgggttcacgtggcctctgcggtgagtctccaagtttctgcctaggcgcctgtgcgtttcctttctgtgacgggattagcttagacatccttgcaaagcgatcactttcaataaattgggaaattgctgctccagcagatgcctcctgcgtctcagatgatccttcctccggcctcgcctggggtggcggcggccgacgggtgaccctcggccctctgtgggcagctgccagactccacccacttgcccaccacagggtcccagccccacggccttcctcccgagaggcagacaaagcttctggaaaaacctcaaatctttaatttctctcttcgcctggtgcagcccagacgtgagacacctgagcttcaaaaacaaacatggtaaaaacagccccagggcccgagagccgttgagttaagtgcgagtgggggagtcccctctccaacacccctcaaagtgcatcgggactggccccccaaagctgggcccataacacccttgataaatctacgggccgacaggcgggagggtggctgcccccagggcccttggggctaaggggacagcggtgtggtttggctttagtgcaaaaagctggtttctttagaggcactttgagtggtgggacccctccccgacctggcgggggggagggttcagggtcagccccgcccccccaccccaagtaaaagcagaccctgcagctggtgaaggccagcccctggggctgtcctcgggctgtttcagccccgggcctggagggggtggggagggagaaggtggtagcttatgttcttgaacgagccggacttagtccaggaaccgctggcaggctttcttccagcggcaggctgtgcaccagaggtcccggcgctccatgccatacaccttccggcacttcttcgcgtcgccgcggggcttcctcagggtgactccgatcctggaggacaaggcgggtgggcaggctccgacctccgtgggctgcggctccaggcgggcgggcgtcaggcagccctggtagacacggtcactgtgacaggactgggggttagcaacggtgctcaggacagggggcgggggcaggggcggggcag

SEQ ID NO: 128 - DNA, 1615 bp, Homo sapiens
aaaagagaaaagaaatgaaccagtattcttaaattgatttcaagtttgaacaaggggttggcatctgcacatccttcctgggcatctcgtgggcactgctcgattaccaccaggccttgcacacctgcctcccctccaagcccctcctgggcctgggctcctctgtgatctacgtcctgtggaacctgctgctactgtggccccgagtcctagctgtggccctgttctcagccctcttccccagtatgtagccctgcatttcctgggcctgtggctggtactgctgctctgggtttggcttcaaggcacagacttcatgctggaccccagttccgagtatcctctatttctcctggttcaacgtggctgagggccacacccgaggccgggccaccatccacttggctttcctcctgagtgacagcattctcctggtggccacctgggtgacttacagctcctggctgcccagcaggattccactgcagctgtggctgcctgtaggaggcggatgcttctttctgggcctggctctgtggcttgtgtgctactgctggctgcaccctagctgatgctgggagcccaaccctgaccaggtggacaggaccagagtctactttcctcagaggggtatcagctgcctcagacccagttagcacagaacttttttccaaggtaaggctgaggctgcttcgccagtgaagggagaggtgaacggcgtcctttgaagcaggatcagacccagccagcagagatggagagtgactgctggcagaaggcaggcgaggataagctaacgatgctgctgtggcctccatgcactcagcaagagtgggatgcctctgctgggccgtgcaccagggatggtgctgagtggggcagaggcctgccttcaaggagttcacagtgaacaagatgagaagggctgggccctgcagggtcaagagccccaattacgtacaagacactttgggaggaaagaagactaccttttcttttccccctgccattggtatagctggtgccccaaaactttcacctccctccctggccacctctaaaatgattggtataggggcttccccaccccttagctcccctatcctgggctagaaggccacagggactgtcctctagaattcttcctcccctcccccacaccattcattcaattcgtgaaacaaatcttcaccgagagcagtttatgtgctaggaacatcattctatccttgcaacctggaacaagaccagctaccaccttagcttcatcccctacttgcaccaaccagtcccgggttagatctcaaatgccggaagtcagggatgcccaactctgggcagccccagtcagaacctctgggatctcagtgaagctggcctggcctctgctcttgctctcaaggggctgcttttcaaccaagagccttgtgagcctggtctgagccttgcacagccactgagtattttttattccttagccagtgtacctcctacctcagagtctatgtgagaggaagagaatgtgtgtccctgtgggtctctgcaagtgacagatgtgttgtttttaacagtattattaggttatgattaaagcctcatgaaatccccttagaaa

SEQ ID NO: 129 - DNA, 1099 bp, Homo sapiens
cttgaactcctgacctcatgatccgcccacctcagcttccctaagtgctgggattacaggcgtgagccaccgcgtctggctgcatgaccttttaacttgtctcatacactcaatattctcaagatataccttccaaagtgaaaaattatggcactttgcagccctgaccactaactgagaactttgatgctttggattttggagacctcattttatcacctggtccttttacttcatgacttgtcatgctgccaccttttgatgggattgagatcaagataataattcccaactggtcaggaatattgtgcccctttgtttttatatccagatgcaatagagcctctgacacaccactactattgttcttaggatttggaacaaaatgcttctttctttgacaaaataaatgttttctttaaagaactcttgattgatcctggaccattgtagaaactgaagtcctatcaatgcaaaaaaatatgacaacatgagctgcttatcatgaaataagtgttttccaattaactatcctgcttcatcagcaggtaggaataatagaatctatacctatgtcttcatgggaagttctctatggccagttgattagtgagggaaaaattgagcctgatttacagaagtcactgtacaacatcacagcagcagccaaaagtagattgcttaggcattataacctacgtgaatgcaattttaaaagaaattcagcctatgtaattggttgtccacgatgtctaggagagatattattgatgtatatgtggcagctaataatttgtctagataattaaggacttggggccaggcctgatggctcacacctgtaatcccagaacttttggaggacaggacaggtggattgtctgaggtcaggagttcgaaaccagcctggctgacatggtgaaactccgtctctactaaaaatacaaaaattagccagatgtggtggtgtgtgcctgcaatcctagctacttgggaggctgaggcaggagaatctcttgaatccaggaggaagaagttgcagtgaaccaagattgcaccactgcactccagcctgggcaacaaagcgaaactctgtccc

SEQ ID NO: 130 - DNA, 1307 bp, Homo sapiens
gttgagttgagtgatctctaaggcctcttccactctgacgttctaggatgtcgttgttctttgacccaactttaggcttccgagaggatgtgctccccaatgggaggtatcgtgtattgtgaaaataacttggcaaacctaatttggattcccagtctcaagacctaccctccctgcgcttttaatcagtgcatatgtaaaatcagtatacgtcggtgcatctcctttggtaattctgaggctaatatgaagtacagagtccagtccagtatagattcagtatttgttagtttctttcctttgtctcttcaccacattttccctctctgggaaatgttatcaacccggtcagcatgaactgtcatttctccagttgaccctctctgatcttcctcctgggcttccatggttagggttacttaggggtggggaggggacagatggagattgaaatacagtcatgtaccatataacaacgttttggtcaagaaagaccacagataccacggtggtgccctaaggttataatggagctgacaaatttctatcacctagttacatagctatcgtaatgtcaaagcaaaatgcatgactcacgtgtgtggtgatgctggtgtaagcaaacctacagtgctgccagtcatataaaatatagcacatacaattgtgtacaggacatcatacttgataatggtaataaatgactgttacttgtttatgtgtttactatcctacacttttattgttattttacagtgtacactcctcctacttataagaaaataaaatttaaccgtaaacagtcttagataggtccttcaggaggtattcaagcaaaaggctttgttatcataggagatgacagctccatgcgtgttattgccctgaagaccgtccagcgggacaagatgtggtagtggaagatagtgacactaagcatcctgaccctgtgtaggcttaggctagtgtatctgtgtctgagttttaacaaaaaagttaaaaatgttaaaaataaaaaataaaggccgggagcggtggctcacgcctattaatcccagcacttcgggaggccgacacaggcggatcacctggggtcaggagtttgagactagcctggccaacatggtaaagcctgtccctactaaaaatacaaaaaattagccagacgtggtagcgggcacctgtaatcccagctactcaggaggctgagacaggagaatggcgtgaacccgggaggtggaggtttcagtgcgccgagatagcgccattgcgctcaagcctgggcaacaagagtaaaactttgtccc

SEQ ID NO: 131 - DNA, 812 bp, Homo sapiens
gagatgaggggctgcctgaatgtctaggtctctaaacatcatccttctcctccgtcctctcttcccttgtccttgtgtctgtgcaggaattcttcttcactccatttgcagccagaggaagggtttccccacagagggggagagaaggcagcttctccaagacccccaagaaccctcagccaggtctgaagggctcagcatggctcagcacccagggctgtcttcaggcccagagaaagagaggcaaaatgagggctgacgtggactgtccacagtgttcatgtgctggagtcagggacggccgcacctgcctccgccggctccagtgtgcggggagcctctgcctgagtgtgcaccaggcccatgtttattgaccacagtctgagggggggggaaggggactgcggtggacaccagaggaagctgtttcctgttgtgatgttggacctgtagtaggacatggtgatttgttaatttccatgggaagccatgatggcctagcatggagggaatctgttcccaggccctgcctggaagttgagggaaagtttagacatctgcagagaggcaggcagcccagcccaggggacccgttcctcttgaaccagtcattgcctgtggcaaatgtgtgtatgagaatgtggggggtggagggcggggccctgatgtggagtagacagtgcgcacctcaggcccacacacggccccgccctggggccttgagcgcaggcctcatctttctgtgccgcgggactctgcacctacctcacagggttgttgtgaggctcaaataaaacatcactcagcacgtg

SEQ ID NO: 132 - DNA, 1225 bp, Homo sapiens
aacacaattttatattttcttgttaactatggggtttcattaagcttaattattattattatttgagatggaatctcactgtgttgctcaggctgcagtgcagcggcctgatcttggctcactacagcctgtgatagagcaagaccctgtctcctgggggtttggggttgcagtgagccgtgattgcaccgctgcgctccagcctaggtgatagagcaagactttctccaaaaaagacagggtcttgctctgtcacctaagctggagggcagcggtgcaatcaccgctgactgtaacctcaatctcccaggctcaagccatcctcccacctcagcctcctaagtaactgggattataggtccatgccaccacatctggccaatattttttgtggagatggggtctcactatgttgcctaggctggtcttaaacctctggtctcaagtgatactcccgcttcagcttcccaaagtgttgagattataggcatgagccactgtgccccaccaagaatgcaatttgagaaagtcacatccacttctgatttaattttgcaaaaaaagtagccatgttataatgtccaaaggtcatccaactttacccactgaactgtgtaattttttaagggcaggaggaaagggaagaagaaatggataataaactcttctttggctgggtgcagtggtttacacctataatcccggcactttgggaggctgaggtaggaggatcacttgagccatgagaccagccggggcaacagagagagacccccatctctaaaaaagatttttaaaaaattggctgagtatggtggtgcacgcctgtggtcacagctactcaggaggctgagcccaggaggtcaaggctacagtgagctctgattgtaccactacactccagctgagggaacaaagcaagatcccattttgaaaataactggccgggtgcggtggctcatgcctgtgatcccagcgctctgggaggccgaggtgggtggatcacttgaagtcaggaatttgagaccagcctggccaacatggcaaaaccctgtgtctactaaaaatacaaaaattagctgggcatggtggtgcacacttgtaatcctagcttctcgggaggctgaggcaggagacttgcttgaacctgggaggcggaggttgccttgagcccagatcgtgccactgcactccagcctgggcaacagaacgagactctgtctcc

SEQ ID NO: 133 - DNA, 1779 bp, Homo sapiens
ttatcttttgctgctatccagaaaaacttagtaattggcttacaaccttggtatgaaaagagcttcactactaaggtgaatgaaaactggttgtagaggctccagtcgtatagcatcatttaacatctttaccttgcgatgcctgtgctttcaggtgtgaaacatgcttgcatatcctgcacttgcccattcttcacactcagtcagctcagatttctatttatgttgggcatcactcatgttgtccagtgtgctgtcattacagtcctgtcctttattgctcagagggacccttaagtggtataggtgaaacttttcaaaagatcccataccccgtaacaggtaggtttaggtatcaaagattggtgaatagtatccatcaattactattataaaccgttttttactgattttaaatcaataagtccacataattctagacatattaatatttgtgggtcttttcaaattcctcatgcactatgatgttttgtcttttttttctttttaaagaaatgaagtcccctctgttacccaggctgaagtgcagtggcacagtcattgctcactgcagcctcgaattcctgggcttaagtgattctcccatctcaggtttccaggtagctgggactgcaggtacaagcaaccatgcctggctgatttttagaatttttttgtagagacggggcatgttggctcacgcctataatcccggcgctttgggaggctgaggcaggaggattgcttgagcccagcaggtcgagaccagcctgggcaacatagcaagaccctgtttgacacacaaacacatggaaaattttgtagagacaggatctcgctatgttgccctggctgatctcaaactccaggcttcatgagatcctcctgcctcagcctctcaaagtgctgggattataggcatgagccacctcacccagccaacatatgtgctcttatagttttgtgatttttatgaacagtttcatttgcattcccccatgccatttttcctaatttataagtacttttcaactattttagcttgtttttctttgctattggaataagcaaataatatgtgtatcttacatatgcacattttttctttttaattaatcttgtgatgaattcttggtacatttcctggggaaaaggatttaaacatctttatggttcttaatgatttttttaaaaagaattattgaacccaaaggatcttgcaggtttcagatgttacatgtttacttttttgtgtagcaaatgttcattaattgcctactttgtgccaaattcaggcctatatcttgctgacgttaggttgtcatttttcttagttttctttgtgactattaaaacgttatcttctaattggcatgtcttgtgtgattgacaagatagtatttaaggacattttttatttcttttctttttatttttaaattaattgatcttttaagagataggtcttgttcatgcgggcgcggtggcttacgcctgtaatcccagcactttgggaggccaaggtgggcagatcacttggggttgggagttcgagaccagtctgaccagcatggagaaaccccgtctctactaaaaatacaaggattggctgggtatggtggcgcgtgcctgtaatcccagctactcgggaggctgaggcagaagaatcgcttgaacccgggaggcggaggttgcagtgagctgagatcgcgccattgcactccagcctggacgacaagagcaaaactccgtctcaaaaaacaacaacaacaaaaaacc

SEQ ID NO: 134 - DNA, 2108 bp, Homo sapiens
gtgcttttcaccttttccttctgtctgtcctggagtttcttgtcgagagtgggactgttgaagcactgccctctcccaggattggatacagtaaggtcccttgaagttgttggatttttttcttttttaacacctgtattgagatataatgtacctcccatgcagttcacccgtttaaagtgcacagttaggtggtttttaggactgaatgggcacagtcaattttacagcattttattttcatcacacactctctgcctgtccctagccaaatgcgctcccaggttctcctctgattccctgcaactacaaatctgccctctgtgtctatggacttgccggtctggacacttcctacaaatggggtcatgcggcgtccctttctgcttcacgtgaagcagcctattggtgaatccttggccccgtggagacctgcatgcgatagatgaatgattccggtgaatgggtgcccctggtgccctggtttgcgttcatcgtctctggaggtgctgtacatattgctgtacttccgcatttttccataaagtgcgccatctttccagggcttcctgctgcttcccagtggctttccctgagtttagtttacagaggaatttattttggggagcgatagtgcatgcagaggggaaggtgttgtgttcagggatggacaggagttgggaggggtttggggctgagtggtgcagttttctgggatcttcagtggctgccattggtgacagagaaagcccctcttaagtacagtccttcaagagccatcttccctggaaaacagaagcgcccttttactttatgagagatgcaacagtcttcaatcattggaaagaaataggttgtattgcattacctctactactgtgctctaagagtagcatgaaatacatcccgtttggtgaccatttgggcttctgcaatgtccgccttcaggagttggcaagcggactcggtggatagcggctgtagcaactgcacccagaccagccctccgtacccagagccctgttgcatgggtatcgactccatcctgggccacccatttgctgctcaggcagggccttacagccccgagaaatttcagccctcgcctcttaaggtaagtagaaaacataggagattgtccggagcccctcaccccaaatattttgccatacgtaccaggtatactgccctggaaggagaggctgtgtgcccccaaattcttcgtgagaagtgtgaggggatgggggaagatgcaccaaaggcaagcagagccgaggctcccggggaggagagccacgtggctgacctgcacacacacacgcagtggcccgggtgttgtggtgtaaaatgggcactgctgttggatttgggggccacagctaaggctgggtttactgtgagccgaggaaaagaagtgaatggcctgagatgtgtaaagggcttgaataggcaccgctgatccattcccaccttcagggacaaagaggctctggagggtttgtgagtcccataggttttggacatttgtagttcctcttccccttttgtgaaatgtagaatagtgctgtccttttgccccttctgctcatctgctcctagctgtactgtcaccctgtctttaggggagaagtctcatgtttatagtgcctgtgaggtcagggaaggcactgtcaatgctgttttgaaactttgtttccccactgttcagctcacaaaagtattttatcaccctcacgcccctgccctcacccagaagcacaaagtgaaatctgcccccggcagcttcccaagctgtgacccacagcaggttcctagttgttgttttggaccaggctgctggtcatggcccttgtccaactttctgagatctcaaaaagcagcagcccaagccagggcgagtggccgtgggagggttttttggtgtttccccttccctcaacttttagttttgaaaaagtgaaatctgcagtaaagttgctagaataatgcaacaaatacctgtacacctcacctggatcccacagttgttagttcttcagcacatttgcattctccctttctgtgtgggcatcacagatacaacaaagttagtatagcgggtgagtagg

SEQ ID NO: 135 - DNA, 1472 bp, Homo sapiens
tggaaattagtctttctggaactgtaacttttggagccaagagccatgagaagcagccatttgacccaatttgtactggagaaacagcatatttaaagcttcattttaggatcttagattacacacttactggatgttatgcagatcagcattcagttcaagtttttgcatcaggaaaaccaaaaataagtgcacaccggaaactaatttcttctgattattacatctggaattctaaagcccctgctccagtaacatatggatcattattattgtaatagtctcatgtttaaatgggattatataatgataacagtttaaagaaaatcataatcttatatttttaatgtggatgcatataacctgtgagtgaaaaatcactgaatgatttaattgtaaaagtagtcttatgtggtgtttgtagtctgatagagcttgaaaggacattttaaaagctaatgtctccaattttgttaaccttcgattttatgccagtataattcagaacatagaaaagtaatgattcacttgggctcattttagactggtcctgggtcaccctgccacacttgtttcctagtgtttctgtggcagacattgctaatcaattacagcccttttctgtactgagccttggataaagggtcaggctcctttttagttcagagattcaggcagccactcccagtgggttgtagataatgtgcaagataaaaactattttctcttccaaatctaagtactaagctcctagtataaggtgttgttccagaataccagagaccatgttagagacaactacatctcttcaaaaaacagccaacagagacaaaggaaaagtgtttaaatagtaagctgttcttcttaatcagaactatcctattgactaataaataatctgcataattctacttaaggtgtgtaatctctgttctagagttagtttttaagtaagcttgttaatctgccactttgacattttgcttaggatgtcagtagccatattaagatgtgtagaataccttcagaagatgatcatagtgttttgtaatcatttaatgtctgcagccaaatttttaaaggtaatttagacctaatactgctcttgctgtgtcttattaagttaaaattaatgaatgaattctggtaaaaattcaaaaggcactctgtgagtagagagtatcatttaagcttattttagtcacatgtagtatatatctccttaaagctgtcactctcactttcttaccattctcttgatttcttcagaaaccatctagtcatcatctttatactctacctgcttctgcaattatatatcatattatgttttcagagcagttcattgtcaagttggactttaagtgaccattcaagaaaagatgaaatctcacgaacctcaaaacttcattcatgtctttttacaaatgagaaaaaaaaatgcattaaagattaatactcaatttgattcc

SEQ ID NO: 136 - DNA, 1524 bp, Homo sapiens
cttttctgtcctcctccaggatggggtcaaccgccatcctcgccctcctcctggctgttctgcaaggagtctgtgccgaagtgcagctggtgcagtccggagcagaggtgaaaaagcccggggactctctgaggatctcctgtaaggcttctggatacacctttaccaacttctggattagctgggtgcgccagatgcccgggaaaggcctggagtggatggggaggattgatcctaatgactctgaaaccagctacagtccgtccttccaaagccacgtcagcatctcaactgacaagtccatcagcactgcctatctccaatggcgcagcctgaaagcctccgacagcgccgtgtattactgtgcgaccctagggaatgtccgtgttgttgctacttcttcggcgagacgctttgactactggggccagggaaccctggtcaccgtctcctcagcatccccgaccagccccaaggtcttcccgctgagcctctgcagcacccagccagatgggaacgtggtcatcgcctacctggagcgaaagcggacagggcgtgaccgccagaaacttcccacccagccaggatgcctccggggacctgtacaccacgagcagccagctgaccctgccggccacacagtgcctatccggcaagtccgtgacatgccacgtgaagcactacacgaatcccagccaggatgtgactgtgccctgcccagttccctcaactccacctaccccatctccctcaactccacctaccccatctccctcatgctgccacccccgactgtcactgcaccgaccggccctcgaggacctgctcttaggttcagaagcgaacctcacgtgcacactgaccggcctgagagatgcctcaggtgtcaccttcacctggacgccctcaagtgggaagagcgctgttcaaggaccacctgagcgtgacctctgtggctgctacagcgtgtccagtgtcctgccgggctgtgccgagccatggaaccatgggaagaccttcacttgcactgctgcctaccccgagtccaagaccccgctaaccgccaccctctcaaaatccggaaacacattccggcccgaggtccacctgctgccgccgccgtcggaggagctggccctgaacgagctggtgacgctgacgtgcctggcacgcggcttcagccccaaggacgtgctggttcgctggctgcaggggtcacaggagctgccccgcgagaagtacctgacttgggcatcccggcaggagcccagccagggcaccaccaccttcgctgtgaccagcatactgcgcgtggcagccgaggactggaagaagggggacaccttctcctgcatggtgggccacgaggccctgccgctggccttcacacagaagaccatcgaccgcttggcgggtaaacccacccatgtcaatgtgtctgttgtcatggcggaggtggacggcacctgctactgagccgcccgcctgtccccacccctgaataaactccatgctcccccaagc

SEQ ID NO: 137 - DNA, 1362 bp, Homo sapiens
ccagcttttgggggcagtgtcccaaagttgctagatcttcctgtttttcaggaacggctagaacctatattcttaagtgaaatatcgtgggttttcagaagttggtgcctactttggcccataatttggggaaggccaggcagaataaatgtgtggggagggtgcagccagtggcctcctcagctgtttttcatgagtcttgaatgtagaaggagggggagagaatagcgagagggaatttaggagtaaaggagattattagaaggagagggggacatgtgagcccctcttcatgttgatgttccattggggaactgcccctcccccattctgggtccagtgtcccatccattgcagaggggcctgaaggtgctgaaggagctcagagccagagcaaaaaggggggacctggcctcacagagaggaaggacaccttttgtttttctgactgtctggcgaaggagatcaagatgattgcacatgcaaacaagttcgtcagtgccaccattgccacctgagtattgggtgctcaagtggaacaggggacttgaggaaggtggggaagcgttggggagtggctggtgaggcaaaccgaagtgggcccacccggacggagagctgggtttctcaacctttgcacgagtgacatcttgggcccgataattctgtgttgtgggggctgacctgtgcactgtaggatgtttagtggcatccctgggctaaatccactggataccaaagctcacacccttcctcccagtcataacagccaaaaatgtcaccagatactgccatgtttccccagggttgagtgggatgggatcactcctacccatctccccgctgagttcctgagtgaggactgcagaatgctgactggacatcaggaatgtgggttgcagtcttcatggctgtatttgttgttgttttcttctgggagtaggagcagagaagatgaagtgaacgatgggttaagtcagatttgttggggatggtgcccattggtgcttcaatggagggataagggggtcgtgggattgatagtatggccaagacatgggtgtagttgaaggcaaaagctcatgggtctgagctacatgaagtcaccagggggtggtgtctgaggactggccaagatcaggtccctgcaaacaaggcagctgtatctttaagatgggaagagagtaataaaacctcttcttagggttgttgagagaatcaaaggctttaatacacagaaagcacttaaaatagtgccttactatgcttgtagtaagtgcccaagaagcgctagctattattatcattaggcttttatagctgcaagtaattgaaactaactcatacccatacccgcttccc

SEQ ID NO: 138 - DNA, 1505 bp, Homo sapiens
atttcaccaacttgtaatattattccaacttctccttcacattcacttaattctcatagagcagtaaccagagttttgtgttctttttctttttctcttcttcttcttttttttaaaaaacaaagtcttgctttgtcgcccagggtgaagtgcagttgtgcgatctcgactcactgcagcctccaccttttgggttcaagagattctcatgcctgagcctcttgagtagctgggattacaagcatctgctaccatgcatggctaatttttgtctttttagtagagacagggggttttatcacattggtcaggctggtcagttttgtgttcttactagagagttctactctgttatgtcagagaaggaaaatgtcttttgatttcatttcaatgaaatgtctattcattaattacatcttcattggcatttcatacaggattaagactatcttctttgccttaatggtatactgtgtgcattgttccttacccatcgtagcagctttgaaggtcttttatccatattggtattttccagtaccagaaaaccaagtcttgaaagaaggacttcatgtcttatccatggacacgccatggttccagaatgtgttgtcagttgataagataggcttgatttgttactggtcttaatgagggctttaggtcagcacaccaggcaatgtaggagttctgggactgttagggaaggcctcaacaacaggtgtattttcctggagatcagttttgtgcgaagccagtaaaccaatcacccgagcaaccttggcccatatatcacagtttgcagctatccacaaatgctggattagcaattggaactagaataaaaaatgtaaatgtaaaaaaagaaaaaattaaaatatttaagtcatgaaacacagaaagtgacagcaaagttaaaaactcagatctttataaaaaggaaatttatactgtacaccaaaaatgatatttgctaaattacaaaggcacttgtatatgaataagattaaaataaaaactaagaacagtacttttagtttctcctaccactttatattctctaaatgacagcccttacctgatagacacacgccaactatcaaaaaaagcaatcttaataccatcctggaagcaagtgaacttacatttttttcaagccaattcccaaatgagggcccactacagaaaacacctccgaaccactgtaattcctttctgaggatgactccaaacactctgccaatcgatgctaaacatgagccaaaagaaacaaaaaaactctgacaaattcccatgagcttaccaatggaccaagattgtccaaaaagtaatattcccagaggataggaaaaaaatgtcttagagggttgatgtctgccttcaatgtcacagcagaaaccttgcagtttaccagatgacccagtaaaggaaccaacacccacaacccgttccacatgggcagttaattccagtcactgatgagaagggaaaaggtctcttagaaa

SEQ ID NO: 139 - DNA, 1579 bp, Homo sapiens
tataaatggagtttaagctagaaaatggtggtttgagctcatatttttggtacccactcccagactgttgtctctttgaagtaataaaaccacagggcagggaacctcatgaagtctggaaagtgcatgtgaggtagtagattattttatcatctctgaggaagagattaattaatcttggtgttatgattctaatacactcctccatactcactacaatggtttgtttatcctgtactagaactagtgtctctcaattctgcttattttgtcagtgcatcgataccctcagttatgctagaaaatctttcccctacagtcacgtacttcacttctgctctcagaaccactttagacaaagttttcttgtcatgctagggttctgctctacctgatgctttaagaccaaagagaacttcctgaggaagatgtagagctacacaggcctgacccactacatctgtgtattgtttgcggacagcctggacttcgttacatggtatcatactgctactcatctctcatgtgcttgtctgtcatatcacccttatggcttatcctgtacttcttaagttccagttcctttttgctactattctatttctattcatcccatttccattgtatctataattttagcaaaaaaaaatttcttgactttatgttttagctactatcctatttcttctttattataaaatgttttcagtgagtcttcatttgctgtcccaatttctctaagagactaatgtggttcagtagaaagaatacgggatttgaaatttaaaagccttgagcgaagttaatttactctctctgataataataattttcctacagggatgttattagatgatcatctgttaatattttaatatttgtaatgttacaatttgttgttatttactctcatttcatacctctatctcacgcacattgcagggatttattctgaagtatagtttatgtcctgtctgttctgaaatcacaaagttgaagttaattttttctgaattggttaaggtaatgctagcttttgtaatagatatacctggaaatcttagtaacttaacataatagaaggttttttttccccttatttacataatggctaattagtggcagtagggtagatgggagtggggtttgccattttcaaaatgtggtcttgtaacgaaaaagcaagttagatgcccactaaatgtagagttcaattaacaagagtgatgtctgattaaaaaaaaaaaaaagtgagtttattccaaagctcattgggggaaagaggcacaaagcattcttcttttaaatgtcccacttcacctttggagcagaaagcaggcatttttataaggcaggggaggagatgagcgaaggcaggggtccccctgctaccaggcagttatctactaggcagttgggttggcaccttcctgggaaaagttgtaaaaggtgccaagtggacatgctttcagcaagccctccaagtaggtgtaagttctgaggcaggtggagaggggacgcagggagagagagagagagaggagagaaaaaggagagagagagagagaggagagagagg

SEQ ID NO: 140 - DNA, 1641 bp, Homo sapiens
  misc_feature 1572,1575,1576: n = a,c,t, or g
agaggagcccagcactagaagtcggcggtgtttccattcggtgatcagcactgaacacagaggactcaccatggactttgggctgaactgggttttcctcgttgctcttttaagaggtgtccagtgtcaggtgcagctggtgcagtctgggggaggcgtggtccagccgggggggtccctgagactctcctgtgcagcgtctggattccccttcagtacctttggcttccactgggtccgccaggctccaggcaaggggctggagtgggtgggccttgtgtcacatgatatcagtgaaagaggctacacagactccgtgaggggccgattcaccatctccagagacgattccaagaacacggtgtatctccagatgcacagcctgagagccgaggacacggctgtctattactgtgcgagagatcgatcagttgtggctgtaccagcaggcccccgtagtgcctttgactactggggccagggaaactcggtcaccgtctcgtctgcatccccgaccagccccaaggtcttcccgctgagcctctgcagcacccagccagatgggaacgtggtcatcgcctgcctggtccagggcttcttcccccaggagccactcagtgtgacctggagcgaaagcggacagggcgtgaccgccagaaacttcccacccagccaggatgcctccggggacctgtacaccacgagcagccagctgaccctgccggccacacagtgcctagccggcaagtccgtgacatgccacgtgaagcactacacgaatcccagccaggatgtgactgtgccctgcccagttccctcaactccacctaccccatctccctcaactccacctaccccatctccctcatgctgccacccccgactgtcactgcaccgaccggccctcgaggacctgctcttaggttcagaagcgaacctcacgtgcacactgaccggcctgagagatgcctcaggtgtcaccttcacctggacgccctcaagtgggaagagcgctgttcaaggaccacctgagcgtgacctctgtggctgctacagcgtgtccagtgtcctgccgggctgtgccgagccatggaaccatgggaagaccttcacttgcactgctgcctaccccgagtccaagaccccgctaaccgccaccctctcaaaatccggaaacacattccggcccgaggtccacctgctgccgccgccgtcggaggagctggccctgaacgagctggtgacgctgacgtgcctggcacgcggcttcagccccaaggacgtgctggttcgctggctgcaggggtcacaggagctgccccgcgagaagtacctgacttgggcatcccggcaggagcccagccagggcaccaccaccttcgctgtgaccagcatactgcgcgtggcagccgaggagtggaagaagggggacaccttctcctgcttggtggccacgaggccctgccgctggccttcacacagaagaccatcgcccgcttggcgggtaaacccacccatgtcaatgtgtctgttgtcatggcggaggtggacggcacctgctactgagccgcncgnnctgtccccacccctgaataaactccatgctcccccaaaaaaaaaaaaaaaaataaaaaaaaaaaa

SEQ ID NO: 141 - DNA, 1492 bp, Homo sapiens
  misc_feature 1066,1457: n = a,c,t, or g
cttccctttcctgctgctgaggtagggattggggggtcagaacccactcacttttgcctgttaaagttgccctcctgacgctggcagctctgccttggtcactggggatgcggctcgttgctcagccaccagtggccttgcggtattgtccaccatccactagagtgggatgaagtccagagtgtgggtatacatctcagatgcccatctacccactggggacttcaatgccagctgcatttggtttggttttcttaactgttggcttctccccacagcgttttttgtttttttttaaacattcatattgttttcaaacttggaattcatagacactctggctctaggttccttaagggggaaaacaaaagatgactttatttcacattcaagaaaatcagttcagttccaaagctgtggtccttccagccacttctagggacactggggaaccttgttaaacgttgacatcagtgctctccagccgtgctgtcaccctcctatcttctggatctgccttcgggatggtcagtgacagcttctggaagctgagcacacacaggtgcacagccatgctgtggtctggcctgctacggcagcatggcagctctggtggagccttctcccttgcatttggttcccctgtgccaagtagctgcaggctgcccctcaaatcttcatttgtcccttttcacttcctgcagaacaagcctgggttagagggtctgctggaaatggcctttgaagacaaggataccaggatgtgtgcactctgtcgtgttctgtgatgaatgggaaacgtaggcttccagaaagccagctctcttctgaaatgtgacggacctaagcaggaagtcatccaggacaggagtggctcagtgttggggatggacgctgtcgcccagccatgctccaccagggccaccaatgtgtagttggctggtggtcttcgggcatgtgagacctgctcttcactgtttccaccccacttggtggcctccaggatggtagtggcaccctcagagccccatcttcagcatgttctgaggcgtgagagtggaagtgncggctaaggctctgtgtggacgcctctctcccgtgatctaaaggggacactgtactcaagcttttgacctcatgccttgtgtagtaaaaaaggatgtgggggttttgtgtggttcgtgagagggttgtgtgttgtttttgtttccttttgtttatgttttggcctttcctctttgtctttccatgtagaccagatatttgaaagggcagacgatggctagaggtgtaatgtgcggcttgtttatgcggtattttgggaaacttacgttgggtgggaaatcgagtcgtggattcaccaggccggtgctggcacactcaccctcgccctttcctccggttcagtacctattgtttctcctttcaaatatgtgattgtactagctctttccatntgaaagaattctccttatttaaataaaaaaagttt

SEQ ID NO: 142 - DNA, 1816 bp, Homo sapiens
  misc_feature 1777,1780: n = a,c,t, or g
ccctgctgttgtgccatgcacacaagtccctagacttccaggtttcagaccacacccagtcccttgacgttcagttcatgcccacccccggaggcctaagctgctttgaagcagaacagcctcaagataccaaagacgccgttcaggaggattgcctcatctctgaatcacttttaccctttcaacttcacccccaaacattccaccccagctgtgacacgtggcgaccagatttggaggctagagccaagttgcttaacacgccttccagggtgtgaaatgctcaacagctctgtctttgcctctctcagttcttcaaggatttgaacatgatgctaattagtttgagagcacataggcttttcttggggaggcacataacagttttttattctgggaagagccagttccccactcaacatattcaataggcacagagaccaggggaccacggaaagctccagtgacccccgacccccgccaactcttcctaacaacatttgactccttgccctcctccgttggaactgtgcttcctggaaggaaagtgattgaagaagaagagatgtagttctgtaaaaggcataaaaacagcttgtttttttaaaaaaataatatttttctgttatgatgcaaattttttcatgactcttctttctctcactctccacagtcatttcatcggcaggtcctgccagctctgcctcccaaacacattgagactgtctgctgctttctgcctgcaccaccaaccctagtctagtgacctttgaccaggggagatttgggcctgtaggggacatttggcaatatgctactggtatctagtgggtggaggccagggatgctacgatatggcgtttaatgcacaggacagcctccacaacaaagaactatctggccatagtgccaagattgagaaacctcgatctgtatagtccaagccaccatcatctcttgcctagacactaaatatcttttttctagaaggagactgtttccactcttgtaccctcccaccccaatccattttctgctcagccagatggatcttttaaaacagaaataaaaccatacattcccgtgcttaaaagtcccatcacacttgcagtgaaatcgttttttcctccccattcatgtgatctgggccctgctaatcttgctggtctcatctcactggccacacccccacttttggcctggctgttctgcatcctgggctttgtactggtgatttctctgctcaagggctccatcccctgccatcccatggccaactccttcttgccatccaagtctctgcctaaataccatctcctcagagaaccccccaccaatttgcattttctgcactgtgcctgttgctggtgcttctcttgattgtgtattctgtattctctgtttctcccactagattctgagctgcctgctagcaggcacggtgctcactgctgtatccctggtatggtgcctggcacatactaagtgcccactaaatgttggctatgagaatgagtgaataaactgcaaatgcatcttctctctccagccttcaacatttttaaagtaatgaattggttgttttaataaatatcataaatgatcattttttaaaaagtgaacaatatacagaagttcaaaaaagcaaattcctcccaccagaaataccagtattattctggtgtttgattgaaacatttctctctgcatatatagaggcagagcagtgggagtgtggctggaccgccaataattttataggaatgtcagcctccanctnttaatctacctttgatcgactactcattgttgaggg

SEQ ID NO: 143 - DNA, 2230 bp, Homo sapiens
  misc_feature 2165: n = a,c,t, or g
agaatagggtgagggttgtggtggggcgtagatggggtggtgctgttgatatcatcccttaagggaaggatattgcttttgtgggagggaaaaggcaggaaaaatatcccactctatatgtataaagcacagttatacatacagcatatatgcagacatataatttgtctatggtattaaaatttcatgcatggggcaattaggaaaaaagcgtctaaaaatgctcttagggagatgatgttgaaaaaaaagttgagaaatactgggctagaccaaacatgatccattgcctgaagcttacgtattatctattactgatgacaaagagaggcacaggtatggagtggcaaactaacaatgcgtgccgtagagaatgtcatacattaaattaatgaacagcttactttatgttgtaattgttgttggtcttctctcattgtactgtaaacatcttaaaagtgggaactgtgtcttatttcgatgtatatctttgtatattagcacactagtccctcaagaggtatgttttgtaagttgaatggaacaaacaacattttatttaacatatactttatttctattttttttaaattttatttatttatttattttgagacagcctctctctttgtcaccgaggccagagtgcagtggtgcaatctcagctcactgcaacctctgcctcctgggctcaagagattctcgtgcctcagcctgccgagtgcctgcgattgcaggcgcgcgccaccacgcctgactggttttcgtatttttttggtggagacggggtttcgctgtgttggccgggctggtctccagctcctaacctcgagtgatccgccagcctcagcctcccgaggtgccgggattgcagatggagtcttgttcactcagtgctcaatgttgcccaggctggagtgcagtggcgtgatctcggctcgctacaacctccacctcccagccgcctaccttggccttccaaagtgccgagattgcagcttctgcccagccgccaccccgtctgggaagtgagaagcgtctctgcctagccgcccatcgtctgggatgcgaggagcccctctgcccggctgcccagtctgggaagtgaggagcacctcttaccggccgccatcccatctaggaactgaggagcatctctgcccggccgcccatcgtctgagatgtggggagcgcctctgccccgtctgggatgtgaggagcgcctctgcccggccgtgaccccgactgggaggtgaggagcgtctctgcctggccgccccatctgagaagtgaggagcccctccgcccggcagccgccccgtctgagaagtgaggagcccctccgcccggcagccgccccgtctgagaagtgaggagcccctccgcccggcagccgccccgtctgagaagtgaggagcccctccgcccggcagccaccccgtctgggaagatgcagacataatgatggcaggagctggagcagccacctgaggacccagagctcaaagccacatgttgagaagggcagagataactgtatccactctggactgctgacctttgaactattatgttatttccagggaaatgcaaaccaaaggatgtggtctctgatctaatccttagagaatgtgaccatgaagacacttttcctacctggtaaacaaaagataatgagaaaagtgaggttggaagttggtttactgagccaggagctataacaggtgctggagcaggggtgtgatctgaatgaccagagggaaggactgatggaattggatggtgagagcctccaggccctttaggcttctccctgactttataatgaaatacaaaagtcagcctccatgcttgtcctttgtgtgtatatgattgtcaaactctgtctatatgtgttacatttgaccttgatggttaattcattatgtaataagttcagaatttgggacagacacagtggctcatgcctgtaatcccagcactttgggaggtcgaggtgggcggatcatctgaggtcaggagttcgagaccagcctgaccaacatggagaaaccctgtctctactagaaatacaaaaaattagccaggcgtgatggcacatgcctgtaatcccagctactcgggaggctgaggcaggagaatcgcttgaactcgggaggcagtgnttgtggtgagccgagatcgcgcacattgtactccagcctgagcaacaagagcgagactccatctc

SEQ ID NO: 144 - DNA, 1025 bp, Homo sapiens
  misc_feature 996: n = a,c,t, or g
ctgataggaaatgactaagtagggactatactgcctttcacgccctggcctttgcacaatgccctgtctctccttgtggcctggcctccccttccttctccctccactgccccggccccgggtgggcccatgaggcacctgcacattgtcagtattgacaatggccccagtgatgttggagagcaggtggatgaactcctcctcgaagccgcgcacacggtcggggatctcgttaatgacgatcttgacgcgctggtcgtccctcaggatgtagatgccgatgatggccgtgtcgttgtggcctgccaggtctcgggccacaatgtccaccacgaagtagccggggctgtaggccatgaagaggtcgaaggtgcgcagaatgccgtccatgctccctgcaggaagcccaaaggcggggtacggctcagagactcagtgccccgaatccccaggaaggggcatgagccctggggtaggtggggcacatctaggggaggcggcacaaatgcccacagggcacagcagggagcaaaggtgacaggcaagtgggaacgatgcccatctgaagtggaaatggctcgggtctcagccggttatcatcacaggggagtgcggatgacaagtttgtgactctgttgtcccatgctagggtgcgaaggaccatttctgagccccctgagtgtctgtctgtttctcctctctctttcaaacacatgtacctcagaattccacaaataagcccgggtgtggtgctcacgcctgaatctcaacactttgggaggctgaggcgggcagatcacttgaggccaggagtttgagactagcctggccaacatgatgaaaccccatctgtactaaaaatacaaaatctagccaggcgtggtggtgcatgcacctactcccagctacttggcaggctgaggcgggagagtctcttgagtccgggaggcagaggctgctgtgagctgagattgcacctctgcattccagcctggncaacagacagagtgagagtctatcaccag

SEQ ID NO: 145 - DNA, 994 bp, Homo sapiens
  misc_feature 963: n = a,c,t, or g
cacagggttaccagctgctggccacacgcctctgccaagacattgatgagtgtgagtctggtgcgcaccagtgctccgaggcccaaacctgtgtcaacttccatgggggctaccgctgcgtggacaccaaccgctgcgtggagccctacatccaggtctctgagaaccgctgtctctgcccggcctccaaccctctatgtcgagagcagccttcatccattgtgcaccgctacatgaccatcacctcggagcggagcgtgcccgctgacgtgttccagatccaggcgacctccgtctaccccggtgcctacaatgcctttcagatccgtgctggaaactcgcagggggacttttacattaggcaaatcaacaacgtcagcgccatgctggtcctcgcccggccggtgacgggcccccgggagtacgtgctggacctggagatggtcaccatgaattccctcatgagctaccgggccagctctgtactgaggctcaccgtctttgtaggggcctacaccttctgaggagcaggagggagccaccctccctgcagctaccctagctgaggagcctgttgtgaggggcagaatgagaaaggcaataaagggagaaagaaagtcctggtggctgaggtgggcgggtcacactgcaggaagcctcaggctggggcagggtggcacttgggggggcaggccaagttcacctaaatgggggtctctatatgttcaggcccaggggcccccattgacaggagctgggagctctgcaccaagcgcttcagtcacccggagaggagaggaggtaacgaggagggcggactccaggccccggcccagagatttggacttggctggcttgcaggggtcctaagacactccactctggacagcgccaggaggccctgggttccattcctaactctgcctcaaactgtacatttggataagcccttgttgttccctnggcctgtttttctataaaacgaggcaactgg

SEQ ID NO: 146 - DNA, 1913 bp, Homo sapiens
caaaacatttagctcatcttattctctctttgtcctctctcccctcctgcccgcccgcaccctggaattgccactcagttcctctgggtgtgcacatatgtttggagaaatagaggagagaaaagagggccacgtaactgagagcttacagtgccaatgccgtttgtgttctggccagagtggagtgcgcagccctgactcccaggcgctgagattgttgcctggttacccaggaagctgctgttccggctgcccagcctttctctgagccagcggatgcacagtccgtggccttcttcaggcttattgatgatgctttttgcaaatgttgaatcatggttctgtttctaagttggatcttttttgttttctccttgccaccctaatttgacatcaaaattctctcttgtgcattgggccctgggtcattcaaacccaggtcacctcattccccttctctgttcacacctaatgtcttgaagagtaggtagcagcagtgtgggctgaacctaggccagcttgcttagcgggtcaccctgctgtgaagtcctggcaggtgttggtaatgtgtggaaatgcagtcagcaagtttgctggggagtttgataaaagtataaaacaaaacaaaaaaagcctcggtataattttgttccacgacttcttctgtagctttacaccagaaggaaggaatgggctacagcaggtagtggaggaagaggggggtgagcaggtgtattaaaatagcttacgggtaaggcctaaaaggtcacccctcggccccctctccaaaagaagggcatgggcacccccaggagaggatggccccaaaaaccttatttttatacatgagagtaaataaacatattttttttacaaaaataacttctgaatttatcagtgttttgccgttaaaaatattcctctatagtaaattatttattggaagatgacttttttaaagctgccgtttgccttggcttggtttcatacactgatttatttttctatgccaggcagtagagtctctctgcctctgaggagcaggctacccgcatcccactcagcccctccctacccctcaagatttgatgaaaattccaaccatgaggatgggtgcatcggggaagggtgagaaggagagcctgcctgctcagggatccaggctcgtagagtcactccctgcccgtctcccagagatgcttcaccagcacctgcctctgagacctcgctctctgttccagcaaccctggttggggggtcagacttgatacactttcaggttgggagtggacccaccccagggcctgctgaggacagagcagccaggccgtcctggctcactttgcagttggcactgggttggggaggaagagagctgatgagtgtggcttccctgagctggggtttccctgcttgtccagttgtgagctgtcctcggtgttaccgaggctgtgcctagagagtggagatttttgatgaaaggtgtgctcgctctctgcgttctatcttctctctcctccttgttcctgcaaaccacaagataaaggtagtggtgtgtctcgaccccatcagcctctcacccactcccagacacacacaagtcctcaaaagtttcagctccgtgtgtgagatgtgcaggttttttctagggggtagggggagactaaaatcgaatataacttaaaatgaaagtatactttttataatttttctttttaaaacttggtgaaattatttcagatacatattttagtgtcaaggcagattagttatttagccaccaaaaaaaagtattgtgtacaatttggggcctcaaatttgactctgcctcaaaaaaaagaaatatatcctatgcagagttacagtcacaaagttgtgtattttatgttacaataaagccttcctctgaaggc

SEQ ID NO: 147 - DNA, 982 bp, Homo sapiens
ggaatgataaattgggccagggcaagaaaaatctagcttcatataatttgtctgggactatacaccctatataatgttagttttacagaagtaatatgacttttgattgctacataccacaaagagtttatgaactgagatcataaagggcaactgatgtgtgaagaaagtagtcagtacatcctggctcatgctctgaaagaatatccagagaggctctctcaaagatcagggagatgtattcccatgccatgcaccctgcttcccagcatttctgcatggtcaagtgagctttatgctcatgagctttaagtatataattatccaggattttaaatcctcaacttgttctagcttgtgatccctcaaagttgggtcatacgttagtgctagatactagaaattttcacttttccactgatcagagagacagacattaaaaacaaaaatagaagaaaggaaagctttcaccctgcagcttcttagcagggaacaattgtcttgccaaaacttttttcccttttctctcccattttcttttacccaatcccttcttactccttgccagtgtgaccatgctttcttctctgtagatgttaacagttaaggcctattttcctcgggcacttaaccaaccaatcagaacaccacatctgttaggggaggtaacctggccaacagtgtatccatcacgttagccctgctggagggaagggacccacattcacctgccctctgacctgccccttgatcccatatctattaccgtgtccataggaataataggtaagggctctgtctctgtcaagccatgtaacaaaggacactgttaaaaaaaaaaaaaagtctggcatcagagggagcatgtggagagcaacttgggaagaacaagttcattttgtattgaatgatttttaatgaatgcaatattaatccttgcagatgagcaataatcattaaaatcgattaaaatgataagacc

SEQ ID NO: 148 - DNA, 1078 bp, Homo sapiens
  misc_feature 1053,1057: n = a,c,t, or g
gattgtagaatgtcgtgctgtcaccagaaagctgctgttttgggttctgcattgagccaaatatgtagaggacctaccaagcccactgagggactaggttttcatgtctctggtcatacctagaatgttctgagccgtctgagggccttcatgccggcagcagctagcaaagccagaaagcaagtctaacaggatctaagatgaccatcaggagaaggagtttgagactgtgtatgcaacccccaatagacccccttttactctgatctggagaatgtatctggcttcatattttcaagtcacatgtctctcagacccctggattcagaacccaaggccacaaatcataggcatgaagcactttcttaagactgacctaacgctggattatttcccgtccaatgcctgcatgctgcttgaattgctccacccacacctccatgaccaagggcgccagagtgctgcaactggggcgtgggccgctctctgcttttcctgtctgactctgacaagtcctccctcactgaatgtagaatcgttgccaagtttctgagaagtgtcgattccctgttaacatggatatcagttctgcctcacatttcccacttgaggttgaggcgtactggagacaacacctcagaccatctgaaccccatcagtggacgaaaatggggctgttaatatactctaaaagccatactaaaaatgctctgagggaactggctaagaatagtgggcctggtgattgtctatcacgcaaggctttgttttgtactgttcagaaatctgtcacctttctgcctgcccttgtttcctgaatgaaatgcttctggggttatttatgaaaggagtgatcctggggcaggcaggaggcagtgggcttcatggctccttgaagttattactgatcttgaccttctctttggctacctttagacaaagaatacgccaatcaatacttggggctctaagttttacaattgatatttatttgtatcatctctttgtctaggaatgtaaaagtgattctaaactaagatgtgtaataaaaancaancagatttattgtacctacaag

SEQ ID NO: 149 - DNA, 1310 bp, Homo sapiens
gtggggactgttaggtacaagagagcaagaaggtgaggggggcctggcacagtggctcatgcctgtaatcccagcacttcaggaggccgaggcaagcagatcatttggggtcaggagttcgagaccagcctggacaacatggtgaaaccctgtctctactaaaaacagaaaaattagccgggcgtggtggtgcgtgtctgtaatcccagctactggggaggctgaggcaggagaatcacttgaacctgggatggtgaggggctgttgggctggctccgtcgcagaggggagatgggaaaggctgacaactgtgcccacccccagggtatattcaggcctgccgggcactcatgatcaccgccatcctcctgggcttcctcggcctcttgctaggcatagcgggcctgcgctgcaccaacattgggggcctggagctctccaggaaagccaagctggcggccaccgcaggggccctccacattctggccggtatctgcgggatggtggccatctcctggtacgccttcaacatcacccgggacttcttcgaccccttgtaccccggaaccaagtgagtgaggaaaccccccaccccccgccctcggggcagcgggtgggactcagccctgccccccggctggcgtctcacttgtcccccgcccccgcgccgcccttgtgcgcaggtacgagctgggccccgccctctacctggggtggagcgcctcactgatctccatcctgggtggcctctgcctctgctccgcctgctgctgcggctctgacgaggacccagccgccaggtgagcagggtgaggcgcaggctggggccgggcgggattggagagaggagggccgcgcccccgctctgaccccgggccctccccgcagcgcccggcggccctaccaggctccagtgtccgtgatgcccgtcgccacctcggaccaagaaggcgacagcagctttggcaaatacggcagaaacgcctacgtgtagcagctctggcccgtgggccccgctgtcttcccactgccccaaggagaggggacctggccggggcccattcccctatagtaacctcaggggccggccacgccccgctcccgtagccccgccccggccacggccccgtgtcttgcactctcatggcccctccaggccaagaactgctcttgggaagtcgcatatctcccctctgaggctggatccctcatcttctgaccctgggttctgggctgtgaaggggacggtgtccccgcacgtttgtattgtgtataaatacattcattaataaatgcatattgtgaccgtc

SEQ ID NO: 150 - DNA, 858 bp, Homo sapiens
gtataggggagaagccgcgtgagatccgcgcgggtgctagctagtcctttctcgtcgctgctcggctcgcggcccgtggggtcggccccgccaccgttgccgccatgcccatgaagggccgcttccccatccgccgtaccctgcaatatctgagccaggggaacgtggtgttcaaggactccgtgaaggtcatgacagtgaattacaacacgcatggggagctgggcgagggcgccaggaagtttgtgtttttcaacatacctcagattcaatacaaaaacccttgggtgcagatcatgatgtttaagaacatgacgccgtcacccttcctgcgattctacttagattctggggagcaggtcctggtggatgtggagaccaagagcaataaggagatcatggagcacatcagaaaaatcttggggaagaatgaggaaaccctcagggaagaggaggaggagaaaaagcagctttctcacccagccaacttcggccctcgaaagtactgcctgcgggagtgcatctgtgaagtggaagggcaggtgccctgccccagcctggtgccattacccaaggagatgagggggaagtacaaagccgctctgaaagccgatgcccaggactaaggcccacggtcactgtgggctggggtgatggtgtctgaccagtggggagattggaatgggattactttggcccagggaagcccctggttctgtccctggagactctggaaatccttttgcattaaaaggactttacacacctgtgtaaaaggatgtgggagaggagggtctgaagctgagctgctaaatgaatatccctgctctgctggtcaataaaacgcttcctaatagc

SEQ ID NO: 151 - DNA, 1154 bp, Homo sapiens
ctgacacatgcctctgcctctgaatgtgaagggaaactggaccagctcagtgtcaagcctgaagaagaatccatggtaattccagagacagacatttccttgttcctggggactgagcagtttgaagtttccaaagatgaaaacatctactctgaagagacctgaatggacaagagatgttttcctcttccttaccataataaaagaggactgctcctgaccacaggatatgcctggtccaggaaatggccacatttcccccctcaggacctctacttggatgggctgccttggaaataagaatgatgaaaatccaaaacactgacaaaccgaatgctatcaaggatgtggagcacaggaactcttattcaatgcaaaatgatagagccactttggaagacagcttggcaatttcttaaaaaactaaacagactctcatcatatgttccagcaattgtattccttggtatttatccaaaggagatgaaaacttatgtccacacaaaaacctgcatgtggatgtttatggcagttttattcatattgccaagacttggaaggaacaaagttgtccttcagtgggtgaatgaataaataaactgtggtacatcttgacaatgggatattattcagcactaaaaggaaatgagctatcaagccatgaaaagacatgaaggaaccttaaatgcatactactaaatgaaagtagcccagtctgaaaaaactacttactgtatgattccaaatatatggcagtctggaaaagccaaaactatgaagacagtaaaaggatcagtggttgctaggggttgtggggagggagggatgaatctgcagagcagagaggattttaagggcagtgaaaatactctgatactataaaggtggtgacatgtcattatacatttgtccaaacccatagaatgtacaacaccaagagtgaaccctaatgtaagctatggtctttggatgatgatgtgttagtgtaagttcattgattggaacaaatgtgcctttctgatatggtatattgatagtgggagaggctatgcccttgttggggaaggggatacataagaactctctgcactttccactcaattttgttggatgaccctaaactgattctggaaaataaagtatattaaaagttc

SEQ ID NO: 152 - DNA, 2290 bp, Homo sapiens
attttctgaggatgaatggaatttactgtatgttgcagtaactcgagccaagaagcgtctcatcatgaccaaatcattggaaaacattttgactttggctggggagtacttcttgcaagcagagctgacaagcaacgtcttaaaaacaggcgtggtgcgctgctgcgtgggacagtgcaacaatgccatccctgttgacaccgtccttaccatgaagaagctgcccatcacctatagcaacaggaaggaaaacaaggggggctacctctgccactcctgtgcggagcagcgcatcgggcccctggcgttcctgacagcctccccggagcaggtgcgcgccatggagcgcactgtggagaacatcgtactgccccggcatgaggccctgctcttcctcgtcttctgaggacaaggcgcacgttctccgcagtgcagagcagcttgccgaggaccccgcgtgaagaaagccagcgaggggggcttctgctccctgagactctgggttcacccacagcactttctgaggaagaggacaccagcccaagctggacctgccatttctccactccctacagacagccagtctccacttgcctcccctctggatgtatctggtcagggaagtgggggatgttcttttgataaaaaaaaaaaaaaaaatttatgtatttaaacttttattacaagatttcaattaaacaggcaccaaaaaaaaaaaaaaaaaaaaaaaaaaaaaggcggccgcttttttttttttttttttttttttttttttcggggaatgagaaaataactttatttcattggggggagcggcccgatgtccagcctaagaacttttggaactgcttcttggtgccggcagccttggtgaccttgagcacgttgaagcgcactgtcttgctcagaggccggcactcgcccactgtgacgatgtcaccgatctggacgtccctgaagcagggggacaggtgtacagacatgttcttgtggcgcttctcgaagcggttgtacttgcggatgtagcgcagatagtctcggcggatgacaatggtcctctgcatcttcatcttggtcaccacgccagagaggatccgccctcgaatggacacattaccagtgaaggggcatttcttgtcaatgtaggtgccctcaatagcctccttgggtgtcttgaagcccagaccgatgttcttgtaataccgcgggagcttctccttgccagtttctcccagcaggaccctcttcttgttttgaaagatggtcggctgcttttggtaggcacgctcagtctgaatgtccgccatcttcccggccgcctgaaaaaaaaaaaaaaaaaaaaaaaaaaaaaagcggcctttttttttttttttttttttttgagatggagtcttgctgtgttgcccaggctggagtgcagtggctcgatctcagctccctgcaagctccgcctcctgggttcacgccatttctcctgcctcagcctcctgagtagctgggaccacaggtgcccaccaccatgcccggctaattttttgcacttttagtagagacggggtttcactgtattagcgaggatggtctcgatctcccgacctcgtgatccgcccgcctcaacctcccaaagtgctggaaccacaggcgtgagccactgcgcccggcctattttcttttctttttgagacagagtcctgctctgttgcccaggctggagtgcagtggtgcaatcttggctcactgcaacctccgcctctaggttgaagtgagtctcatgccttggccacatgagtagctgggattacaggagtgtgccaccccacctggcagattttttttttttttttcagatttttgtatctttagtagaattgggatctcgccatgctggctaggccagtctcgaactcctggcctcaagtgatcctcctgccttggcctcttgaagtgctgggattacaggcatgagccacagtgcctggcctcttttgtggtttgaataaagattacctatgaccaggcatggtggctcacgcctgtaatcccaacactttgggaggttgaggcgggcggatcatgaggtcaagagattgagaccatcccggccaacatggcgaaaccccatctctactaaaaatacaaaaattagctgggtgtggtggcgcatgcctgtagtcccagccactcgggaggccaaggcaggagaatagcttgaacccgggaggcggaggttgcagtgagccaagatcgcgccactgcactccagcctggagacacagcaagactccgtctc

SEQ ID NO: 153 - DNA, 446 bp, Homo sapiens
cgccgtctcaaaaaaaaaaaaagaaaattgtgcaaagcataggtaaatatttttctttattaagcttctcactgagaagccctctttattttggtaaatgtcactctgtttgttaggagatgtctgcttttccatgaaatgaaatagtggctaaagccctgaaagaggcaagactacaatgggctgaaacagttggtatagcaaccccagagaagtgcttcattttctttttatagtagaagcaggtccatgtcttttgtggtttcctgcacatctttggagtagttatgacttctcagtttttccccccttaaactgcattgcctattcttttttcctgacatgctatcaggtatcagtgtgttgaatacatactgcttgtgtatcagacttacgttactgtcatcaccattaaaagaattgcagccttgtgccccatgaccttc

SEQ ID NO: 154 - DNA, 2732 bp, Homo sapiens
gaagccttgacttcatctcagctccagagcccgccctctcttcctgcagcctgggaacttcagccggctggagccccaccatggctgcaatccgaaagaagctggtgatcgttggggatggtgcctgtgggaagacctgcctcctcatcgtcttcagcaaggatcagtttccggaggtctacgtccctactgtctttgagaactatattgcggacattgaggtggacggcaagcaggtggagctggctctgtgggacacagcagggcaggaagactatgatcgactgcggcctctctcctacccggacactgatgtcatcctcatgtgcttctccatcgacagccctgacagcctggaaaacattcctgagaagtggaccccagaggtgaagcacttctgccccaacgtgcccatcatcctggtggggaataagaaggacctgaggcaagacgagcacaccaggagagagctggccaagatgaagcaggagcccgttcggtctgaggaaggccgggacatggcgaaccggatcagtgcctttggctaccttgagtgctcagccaagaccaaggagggagtgcgggaggtgtttgagatggccactcgggctggcctccaggtccgcaagaacaagcgtcggaggggctgtcccattctctgagatccccaaggcctttcctacatgccccctcccttcacaggggtacagaaattatccccctacaaccccagcctcctgagggctccatgctgaaggctcccattttcagttccctcctgcccaggactgcattgttttctagccccgaggtggtggcacgggccctccctcccagcgctctgggagccacgcctatgccctgcccttcctcagggcccctggggatcttgccccctttgaccttccccaaaggatggtcacacaccagcactttatacacttctggctcacaggaaagtgtctgcagtaggggacccagagtcccaggcccctggagttgttttcggcaggggccttgctctcactgcatttggtcaggggggcatgaataaaggctacaggctccaaaaaaaaaaaaaaaaaaaaaaaaacttagaaagcggccgcttttttttttttttttttttttttttttttgcaggggcccagggcagcgctgggtgctttatttccatgctgggtgcctgggaagtatgtacacggggtacgtgccaagcatcctcacgcgaccccgagagcctggggagcgggggcttgccggccgtggcactcatttacccggagacagggagaggctcttctgcgtgtagtggttgtgcagagcctcatgcatcacggagcatgagaagacgttcccctgctgccacctgctcttgtccacggtgagcttgctgtagaggaagaaggagccgtcggagtccagcatgggaggtgtggtcttgtagttgttctccggctgcccattgctctcccactccacggcgatgtcgctggggtagaagcctttgaccaggcaggtcaggctgacctggttcttggtcatctcctcccgggatgggggcagggtgtacacctgtggttctcggggctgccctttggttttggagatggttttctcgatgggggctgggaggcctttgttggagaccttgcacttgtactccttgccgttcaagccagtcctggtgcacaacggtgaggacgctgaccacacggaacgtgctgttgaactgctcctcccgtggctttgtcttggcattatgcacctccacgccgtccacgtaccagttgaactggacctcggggtcttcgtggctcacgtccaccaccacgcacgtgacctcaggggtccgggagatcatgagggtgtccttgggttttggggggaagaggaagactgacggtcctgccacaggtggtgctgggcacggtgggcactcgacacaacatttgcgctcaactgtcttgtccaccttggtgttgctgggcttgtgatctacgttgcaggtgtaggtctgggtgccgaagttgctggagggcacggtcaccacgctgctgagggagtagagtcctgaggactgtaggacagctgggaaggtgtgcacgccgctggtcagagcgcctgagttccacgacaccgtcaccggttcggggaagtagtccttgaccaggcagcccagggccgctgtgctctcggaggtgctcctggagcagggcgccagggggaagaccgatgggcccttggtggaggctgaggagacggtgaccatggttccctggccccaggaataacctgtcacgccctctctcagattcttcgcgcagtagtatatggccgtgtcgtcgactctcaggccgtccatttgtagagagaccgtgttctgagaattgtctctggagatggagaagcggccccgcacagattctgcgtagtagaaactccagccactcccactaatggctgagacccactccagccccttccctggagtctggcggagccaggtcatggcataggtgctaaaggtgaagccggaggctgtacaggagagtctcagggacccccccggctgcaccaagcctccccccgactccaacagttgcacgtcacactggacaccttttaaaatagccacaagaaaaagccagctcagccctaactccatggtgagttctctctcttcagtcctgatcaccaaatgaaaacacctgaaaatcccagggctgggc

SEQ ID NO: 155 - DNA, 582 bp, Homo sapiens
cagagcctgggccagaggcaggttcaacttagaaatccctccgggactaggggaagccctcactctgagaatgagcacatgctccagaaagggggcatcaggtaaagtttcttttcccgtgggtcctgtcagtagcatttgtacttaggagctttgccgtttgccagctgaaagttgccattttcattaacgtagcttgccgtttctgtatctaataacaacaaacacttttgtaatatgtaccctgtgccaggcagtgtactgggcactttgaaaatacgaaggttggccgggcgcggtggctcatgcctgtaaccccagcactttgggaggccagggcgggtggatcacctgaggtcaggagttctagactggtcaagaccagtctgaccaatatggtgaaaccttgtctctgctaagaatacagaaattagccgggtgtggtggtgggtgtctgtagtcccagctactcgggaggctgagacaggagaattgcttgaaccggagaggtggaggctgcagtgagctaagatcatgccactgcaccactccagcctgggcgacagagcgagactccgtctc

SEQ ID NO: 156 - DNA, 731 bp, Homo sapiens
agataatgaccattcatttcacaaattatcactttgattaagttttactcctgattatataggttagtctgtggtttaccagatggggtgtcatgagtgctcaactgccagaggcccaaacgcagctcagtaagaaaatgcttttgagctataacccaggttgagtaccattggtacattagaatcacagagtcagattttactttttggggcagtggtaggtgtggataaagtatctccagtccagatttcttgtactggtgctattgggtttgcgggtggagatttatgacctcagggataataaccggaagaacagtgagtagaaagctcagggatatgagttttgctgtatatcaaagctgtgtgactttgggaaaattacttaacctttctgggccttagctttgctacctattcatcaagaacaataaaatccatcttgtttatttcatgagattggtgtgaggaccaaatgaaatagtatatgggaaggtgtttaaaaagttgtgagttctacacgacttaaaaatgccagtattatgaatgcaaccattctttgttgtcatttgggtagtcgtggatagcgtggtggtaggagagccactatcggagcaagactgttccagagggtaaaacacacgcgtgcctgtagagcagttgtcactggtagagccatgatgggagctcttactacattgctatttgtactgagttaaatagtgttctcc

SEQ ID NO: 157 - DNA, 868 bp, Homo sapiens
  misc_feature 832: n = a,c,t, or g
ggaagcagcactggtggtgccgcagccatggcctggaccgttctcctcctcggcctcctctctcactgcacagtctctacgacctcctatgtgctgacgcagccaccctcggtgtcagtggccccaggacaggcggcctccgtaacgtgtgtgggacacgatgttggaagtaaaagtgtgaactggtatcaacagaagccaggccaggcccccgtcctggtcctttatgatgattccgaccggccctcagggatccctgagcgtttctctggctccaactctggaaacacggccaccctgaccatcaggggggtcgaggccgcggatgaggccgactattattgtcaactttggtttatcaacagtcgtgaggcggttttcggcggagggaccaagctgaccgtcctacgtcagcccaaggctgccccctcggtcactctgttcccgccctcctctgaggagcttcaagccaacaaggccacactggtgtgtctcataagtgacttctacccgggagccgtgacagtggcctggaaggcagatagcagccccgtcaaggcgggagtggagaccaccacaccctccaaacaaagcaacaacaagtacgcggccagcagctatctgagcctgacgcctgagcagtggaagtcccacagaagctacagctgccaggtcacgcatgaagggagcaccgtggagaagacagtggcccctacagaatgttcataggttctcaaccctcaccccccaccacgggagactagagctgcaggatcccaggggaggggtctctcctcccaccccaaggcatcaagcccttctccctgcactnaataaaccctcaataaatattttcattgtcaatcag

SEQ ID NO: 158 - DNA, 857 bp, Homo sapiens
gtctccaccatggcctggacccctctctggctcactctcctcactctttgcataggttctgtggtttcttctgagctgactcaggaccctgctgtgtctgtggccttgggacagacagtcaggatcacatgccgaggagacagcctcggaaagtattatacaaattggtaccaactgaagccaggacaggcccctgtccttgtcagctatggtaaaaacaaccggcacaaccggccctcaggaatcccagaacgattctctggctccacttcaggaaacacagcttccttgaccatcactggggctcaggttgaagatgagtctgacttttactgtagttcccgggacagcagtggtaaaaattgggtgttcggcggtgggaccaagctgaccgtcctaagtcagcccaaggctgccccctcggtcactctgttcccaccctcctctgaggagcttcaagccaacaaggccacactggtgtgtctcataagtgacttctacccgggagccgtgacagtggcctggaaggcagatagcagccccgtcaaggcgggagtggagaccaccacaccctccaaacaaagcaacaacaagtacgcggccagcagctacctgagcctgacgcctgagcagtggaagtcccacaaaagctacagctgccaggtcacgcatgaagggagcaccgtggagaagacagtggcccctacagaatgttcataggttctcatccctcaccccccaccacgggagactagagctgcaggatcccaggggaggggtctctcctcccaccccaaggcatcaagcccttctccctgcactcaataaaccctcaataaatattctcattgtcaatc

SEQ ID NO: 159 - DNA, 1456 bp, Homo sapiens
ggaatgaagagcaagcgccatgttgaagccatcattaccattcacatccctcttattcctgcagctgcccctgctgggagtggggctgaacacgacaattctgacgcccaatgggaatgaagacaccacagctgatttcttcctgaccactatgcccactgactccctcagtgtttccactctgcccctcccagaggttcagtgttttgtgttcaatgtcgagtacatgaattgcacttggaacagcagctctgagccccagcctaccaacctcactctgcattattggtacaagaactcggataatgataaagtccagaagtgcagccactatctattctctgaagaaatcacttctggctgtcagttgcaaaaaaaggagatccacctctaccaaacatttgttgttcagctccaggacccacgggaacccaggagacaggccacacagatgctaaaactgcagaatctggtgatcccctgggctccagagaacctaacacttcacaaactgagtgaatcccagctagaactgaactggaacaacagattcttgaaccactgtttggagcacttggtgcagtaccggactgactgggaccacagctggactgaacaatcagtggattatagacataagttctccttgcctagtgtggatgggcagaaacgctacacgtttcgtgttcggagccgctttaacccactctgtggaagtgctcagcattggagtgaatggagccacccaatccactgggggagcaatacttcaaaagagaatcctttcctgtttgcattggaagccgtggttatctctgttggctccatgggattgattatcagccttctctgtgtgtatttctggctggaacggacgatgccccgaattcccaccctgaagaacctagaggatcttgttactgaataccacgggaacttttcggcctggagtggtgtgtctaagggactggctgagagtctgcagccagactacagtgaacgactctgcctcgtcagtgagattcccccaaaaggaggggcccttggggaggggcctggggcctccccatgcaaccagcatagcccctactgggcccccccatgttacaccctaaagcctgaaacctgaaccccaatcctctgacagaagaaccccagggtcctgtagccctaagtggtactaactttccttcattcaacccacctgcgtctcatactcacctcaccccactgtggctgatttggaattttgtgcccccatgtaagcaccccttcatttggcattccccacttgagaattacccttttgccccgaacatgtttttcttctccctcagtctggcccttccttttcgcaggattcttcctccctccctctttccctcccttcctctttccatctaccctccgattgttcctgaaccgatgagaaataaagtttctgttgataatcacc

SEQ ID NO: 160 - DNA, 585 bp, Homo sapiens
gtccttactgagcaacgatttaaaacttaatttaaaaatgagagaagagtatgacaaaattcagattgctgacttgatggaagaaaagttccgaggtgatgctggtttgggcaaactaataaaaattttcgaagatataccaacgcttgaagacctggctgaaactcttaaaaaagaaaagttaaaagtaaaaggaccagccctatcaagaaagaggaagaaggaagtggatgctacttcacctgcaccctccacaagcagcactgtcaaaactgaaggagcagaggcaactcctggagctcagaaaagaaaaaaatcaaccaaagaaaaggctggacccaaagggagtaaggtgtccgaggaacagactcagcctccctctcctgcaggagccggcatgtccacagccatgggccgttccccatctcccaagacctcattgtcagctccacccaacagttcttcaactgagaacccgaaaacagtggccaaatgtcaggtaactcccagaagaaatgttctccaaaaacgcccagtgatagtgaaggtactgagtacaacaaagccatttgaatatgagacccc

SEQ ID NO: 161 - DNA, 592 bp, Homo sapiens
attcatatgttttcttaacagtgtgaactgtctgatattgaataacttctgaatcaggaagaaaggtattcccacattctttatctccacagaatttctcacttgtgtgaattaactgatgttgagtatgatctgaaccagaaataaaggctttccccagttctttaaattcattcagtttgtctcctgtattaagtctctggtgtagattaaacactgtatgctggttaaaagtgggccttttttcacaggtgcgtatcacctgcttgaagcattcctcttgattatcttgaagtgtttgaaactgagtgttgccttcccagtcacctctaaaacataaacagtcaaggctgtggtttttacaaattctcattatttccaattgggctatttctctctcaaaaatgccattttttggtaataacttcttggtctgacacctcgactgcatgtctgaaaaataagaaggtaaaaacatcatacggttgtatgtacaaaaagcaatacaacttctaaaatagatatagaaaatcttgaagtaaagcatatgagaagtgaatggcttagaaaattctcaaatatgagcaatatg

SEQ ID NO: 162 - DNA, 3760 bp, Homo sapiens
aaactcctgcctgaagtcaaacaccttgtacatcagagagttcacacaggttagtgtggacatccccttgtgtgttggactcataatctgaagactcacagaatggaaaccatgattataacaagaccacatggtataacaatactagactatagacaagtaaaaatttataaatattaagaatgtatatacatgtcaccatggattggaactgttttgcatatcagggaaatcatagccaaggggaaatctatcagtataaggaatgtggaagacataatcctttggaaactgttaatactaaaagatatgtttctgatacaatagcaaacttgaaaaaaaaaaaagaaatagaagattcctgctgtgaataaacatacttcttgtgtaaatagaaactgtaaagtcatcaggatagctagttaagtcggtaaccttaaactcatgtaagcagttcccaaagaacataggacttatgtttggggagagggttgtttttattacagtacattacaggaattgtatgttcacttcgaatcatgtttgaaaaaacgttgtatccttattttgtaattcatatagtaagagtattctaaacagcactacattaatatcatttgataggtataaagtatactttttcttgcactcttctctaggatttaatgcattgatcattcttaatgaacaatatcagctctaaaggaccaatgcttttataatgttttcaactgtatctgagtcagccagagagataaatatccatgtataaaatagatagaaaactttgcttggtaatttaaaattaataatgccagttttccaagagtgagaaaatcattgcactctatacagttttaagatatacttaaaatattcccatttgtatctatttttttttctactgttttttatttggacacttacataacagtgcagagcacaatgctgtgtaacataggaattcactgtgttttcatttgatgtcgtactggttttaaaccttgtgctctactccttcctgttaatgaattaagaacacattctaacaagggtctgtggcagacattgccgagtgactttcttagtcactcccttactctgctggcggagtttggttatccatttatcctcaaaaggaagtgagataaatcctgattagttttaaccagtgacactccccttctcgttgccagcagttgatttacagtggtcacagggcccaattctagacataaaacaaaggatatacctgacagactacttctggaaaaggttttctcaaaggcccaaggattcaagcaaagggaagtggaatcttgtggtgaacagtaccttgtctggatgtggtgcctggtaaccatctttcagcaatggattatagtttaatcatggcctgagcagaaatactgaaagaccctgagacctggatgatgtctttgagccaccaaaccaagcagccttgtagccactcctcctttggactgtttcttttgtgagagactaaacttatttttaagccagttgatttaggatgctctattactaataactgaagacattctaattggtacagactgaaacctttataggagttatgcagttcagaagtggactttaggtaagtcatttattttaagctgttgatatagagatttattttctgtaaattttgacgtaaatagtttgagcattagaaatcaacttgaaacaataaaatgtatgcttccttgaactgtcatatcgttgacctgcaaaattcacctttggaacgtgacacaatgttaggcatacctccttttttctaatacatggaatacattttgttggaggtaatttatgtgattcatataccactgctacagtgttagctgacaacatatagtatgaggtaaggatctaattctgtttcctctcacatgattacttgatagctaagcatctgattggtttactgctttaccactgagctgaaatgccgtgttttccatttattaaaatcacacatggctcctgtttttgtcactcagcactttttctccatattcttcaagacgattgtgagtatggtacgtaacaggaattacatcttggtaagttgtatagttttgtgtaggaactctatattcatagcatatttgtggaaatgatacctatggaggtttctcacactggtgtgtcattatacattaattgtacaatatgcattttcagtaaaatatttgaaaactgcaaaaaaaaaaaaaaaaaaaaaaaaaaggcagtgagactgactgcgtcggggttgagactgggtggatgaggctcaccccggcggggagaagggacgaggagggacggacagcggaaggtccgggagtgtccgccataaagtcgtttgaggtgaccgttgcgtaattgtgagtctgtgagagaagatgtgaagtatggcctcgtcccggtcatctgggcgtgcgggtcccgggttttgatcgcgcgtttgtgtagttttaacttctagtcatggcgaatgatcgcaggagagcacagactggaccctgctacgatctctcttggagtggatcagactgatgatcaccaacaaccaactcattcccggataaggaagaagagagtgtcacctacttcagtgtggtttcaaccctacttctgcatcttaaagacactgtatggtttcagcagtagtgcccctgttcattagtccccctgatgttttcattcctcatctcatctttttcttagcagcattcaatgaatccttcattctagaaacactctatatctttggttttcatgagaccattctcaccttgttttgtcctgtgacttttttgaaaaaaacaaaaacaaaaaaccctttttttctttttaaattctggtaaaaaacacaatgaaaatttgctatcttaaccatgttgaaatgtgcagttagtaaagtacattcacattgtggtgcaagccatcactaccatccatcactagaacccttttcatcttgcagatctgaaactctacccattaaacaacttcccatcttcccatccccacagctcctagcaaccaacattctactttctctatcagtttgactactctaggtacctcatatgagtagaatcatacagcatttatccttctctgcctggcttatttcacttgtataatgtcctcaaggttcattcatgttgtagcatgcatcagaacttcctccccttttaaaggctggataatatttcatggtatgtttagatcacattctgtttatccattcatccatcagtgaacacttgtgctccttccaactttgggctgttgggtgtcctgccactgttgctcctagtgctcaatctcgtttattccctcctaatcaagtgtacaacgttggacactgtgcaggatgatgccacttcatcttggatgctaatctgccatgttgacttctgattaaccccaggcccaggaatgcctcaagatttctactttacttactgttgcttgtgtaagccaagacaaccttgatgttatcataaacatgtacttacctaagtcctgtcctttggcaaattatgggctatgagacacagcattcttgcctttccctgaggggtcaatttcagcgatcctacacattccttctgaagcacttatgctctttctatatggtatgtaagctctcggtctggggagtaacagtgcagagatctacctgtcttgttgccacatgtttctaaactttccaataaatcaccttctactgacc

SEQ ID NO: 163 - DNA, 766 bp, Homo sapiens
gaagaacagtgagtacctagaactgtgccactaattaaaggaaatcctaagaaggtgcatttctttacagagctgtgtcatgccatcctttgggccctctgctggaaaagtagaatcaagtctcaaataatgcctttttaattgtatcctctagtattatagatataggacagtaccgtatcatacctctgtgaatgtaaaatatcttgtacctgctttatgatacgtagtagtgaccgtgctttatcagagctgtttttaatgatgttattctagaatgttttctttccagatgatgattcagaagctaattttaaaaaacggtgccaggtaccacaacagtaacagaactttgcaattttctggggttttgttttttacctttttccccccttttttttaaatggagtgtgctggatgtctctataattttattcagatgactgcagaacctggaaaagctgttgctgctattgatgcataacatactgctattggtctttttatataaatatatatatatatatacatatatatatataatttgaatttttggaaactttagctgtgctgtcaactttggaaaaagtatcccggtttactgtgttgagttggcattgtacagaaattaacagccatattggtctagaaacgttaaacttaatttttttccatttgtacaggggtaacgcactgtattaaatatgtaaggtcttatctacatgggtttgattacagaaactaataaagtattctctaaataaag

SEQ ID NO: 164 - DNA, 3999 bp, Homo sapiens
  misc_feature 3578: n = a,c,t, or g
ctctactcaaaacaaacactcttccctatcttcattgcattttgttgaaatcccatggctgttcatagctctcctcagatgcaggcccacccccacccgtgctgtttcctccttgtctcatcctgcctgtcacgttctcctgctcggcgggctccacctcttctgctgccctctaggagatggccagcctttcctgtgctgccactgttgtctcaccttacagtcttcctggctccagatgagtttgagagcttttgcttatctttgtaacccatttagtatctaacgtggcattttatacataggaagcttctctcatcagtattggtggatgtgaaccaaattgaatactggcaggttggtgacacggagagctatgtgcatatgcaaaagctgtagcccctcacctctggttagttggccataggatggagtgtacttaaggtacatagactattttactcccaagaatgctaggcactcactgtcttaattgaggccaccagatacacacatgagaatataaataacggcttgtggcaataatgactaaatgccaaggagtggctggtaaaccgcggtgttccctagagaccccggcctgggctctacttaggctgcctcttggacatcagaccaaggcttacattctgaatccacagggcatccacatgggtggtgtcagtcccccacagacagagaagtgtcccgttgcatttttccatctattccagtagtaagattgtgtcatttgagattttctttaactgtataattggacgtttaattaacaaaccagagaggaggaaaaacaatgaggtgggtagagcatcatgttcagcctcagggctgtacagcaaagcaattttagactgcggatgttgagtctccagttaccctgagtgccagttacagtgattcacatctgaaagaacagtactgcaggagagggacagcccagggtggatgggtggggtgggcaggagctggctgccaactccttccctgagctgggcctgcagagccctgaggagtggggcatgctgtcctttttgcctgatttccaaggattctgcttaacgaattacttcgttcattttagtaagcacaggtggctggtgaagattttccagctaggtagatctttttgtgtgtggcttatgacttttagggggtgagggaagaaaatagacgaaaatagacttagttacaaatgtgagtctgtgcaggaaaatgtggaggtcagtcgttagttgtgttgtatcaaagacgtgaatgaggaactagctgaagtgtaagaggttgattttcctgtacgattaaaaataaacctgcctctatgcatttcagtcgcaatgtatctgctgagcaaaaagatgaaaacaaagaagcaaagcctcgatccctacgcttcacctggagcatgaaaaccactagttcaatggatcccggggacatgatgcgggaaatccgcaaagtgttggacgccaataactgcgactatgagcagagggagcgcttcttgctcttctgcgtccacggagatgggcacgcggagaacctcgtgcagtgggaaatggaagtgtgcaagctgccaagactgtctctgaacggggtccggtttaagcggatatcggggacatccatagccttcaaaaatattgcttccaaaattgccaatgagctaaagctgtaacccagtgattatgatgtaaattaagtagcaattaaagtgttttcctgaacactgatggaaatgtatagaataatatttaggcaataacgtctgcatcttctaaatcatgaaattaaagtctgaggacgagagcacgcctgggagcgaaagctggccttttttctacgaatgcactacattaaagatgtgcaacctatgcgccccctgccctacttccgttaccctgagagtcggcgtgtggccccatctccatgtgcctcccgtctgggtgggtgtgagagtggacggtatgtgtgtgaagtggtgtatatggaagcatctccctacactggcagccagtcattactagtacctctgcgggagatcatccggtgctaaaacattacagttgccaaggaggaaaatactgaatgactgctaagaattaaccttaagaccagttcatagttaatacaggtttacagttcatgcctgtggttttgtgtttgttgttttgtgtttttttagtgcaaaaggtttaaatttatagttgtgaacattgcttgtgtgtgtttttctaagtagattcacaagataattaaaaattcactttttctctttttttttttttttttttttttgtacaaatggggtttccctatgttgctcaggctggtcctgaactcccagtctcaagtgatcctcccaccttggcctcccaaagtgctgggattacaggcagaagccaccatgcccagcctcaacaaggactttaaggggtcctgagagcaagaagtccaaaaactctgctctagggtgaggatataaaactctgcctggagagatccatgtgggggaaactgtggcaccccagcagacacccatgacagcaaggcccctgagggctgccagcccagccaccacgggtggcagtgcaggaataacctgtggggccagagccccacccaccagcccacagatgcgggaaaggtgatgaggcctcatgttaggcccagaagtttcagggttggtcactcagaaacaggtgagcaggaaccacccacggccaagccggaggctgctgagccatgcccaagatcagagacgcacgcgtctggagcagcgcctgacacctgaccctggtggctgaccatgcggcctgcctggcagtcctgggcatgggatgcacacccgcaccctggcccacccaggggcagaagaggggaccacgaagttgtgtgttttctgctgagagcatccaccagagcagagctgctcaggagggcacacggtgctgcaggctgagcatgtcacacgcagagccaaggccgcctgctgggaagcccaccgctggcagggagcacagcctacgcacagaatgatgctctcatggtaatactccccacggaaccctgcaggggttcattttattctatattgtcatcttttttaacattaaaaacttggctaccggtgacactgattatttcttttaacccacaatattcataagatggttgccaaattgtaagagcaatctgacctgccaccgaagcctcctgagcgcagcctgaggtctccttgctgttcctcctgtcctcagactgtcccccatgcccacatgagctcaagggctttgctggcacagctcttcagctcagaggttatccaggtgatacacagccaggctcaccagttcctgctcacagaggcttccctccctgccccttcgtctattcaactgatacgggagctgagtcacatgcgctcctgctggctaaatttgacacagcccattcatcaaaatattattaaagacgacaatcgactgaaaaatattaaataaaaacccacgtgtccctggaaccatgagggggtggaggcaaaggcagcccttctgagncaaagcaccagggagccagggctccctccataggcctgcatggcgagtcccctccctcacctccgcaggtctctgctctactgctccttctcaaagaggccttctagagctcctattcaaacagctctcccacgcaccccctccaggcaccccatcccacacctccttactcccgtccccctcggcagtggggaagctgcccaggggtggctcctgttgcctctgttcacgcgtgtccggagcactcagagcaggctgcgcgcatgcaggcctccaacaggaacctgactcaacccagattctcaggcccacactcttgtatttcatgacaccactgctatgacaaatggtcctgtcacatgtggcacaaagaacagggcacgcagcagaagggcagatgtgccgggaggaggaacccaga

SEQ ID NO: 165 - DNA, 1474 bp, Homo sapiens
tagtgactcttgaactaagatgtgtttccttaaccacttcagccattcccagtgtatgtttgggttgctgatgaggggagggtccttcgatttgcttgggtgtgagggtaagcacctacagcaacatgtgtctgcccgcctggagagatggggctggcgtggggcagacctcaagttgtctgagtcggtggtcccctgccttaacaccctgcctgcccctcacctccaacagacacctggcttttggagggcgccgaggtcatgtggctgcccttgattgggtaacaaagaagcttatgtgcgagatcaacgtcatggaggcggtgcgggacatccggtcagtggcctcactgtcagcggtcagttggggtgagatagtccattcctgattgaatgatagcctgtgacctcatttcccaattgaaccactcttcctctcccccaggtttctccattctgaggcaactgcttgctgttgctcagaaccgctggctccacatctatgacaatcagggcattgagctccactgtatccgccgctgtgaccgagtaacacggcttgagttcctgcccttccacttcctcctggctacagctgtgagtggccatggagctcaggaactggttggaagcccttgggatgaccacctctcctttaggaccccagcagagggaatacagagggcaatcaggactgggtcattctctctgtctttctctctcagtcagaaacagggtttctaacctacctggatgtgtcagtggggaagattgtggcagctctgaatgctcgagctgggcggctcgatgttatgagtcagaacccttacaatgccgtcatccatctcggacacagcaatggtcagtacctggcttagttttgactctgaccatcctgacttgcttttcttctatatttgtacttcatgagtcccttaaagttacccttttatttcccttttttgttatctcttggtcttgagttcccatctttcccatgtttagtaacctcaggcttaggtgtgtattagcactttggttcttctctcttccaggtactgtgtctttatggagtccggctgtgagggagccactggcaaggattctctgtcgtcgtggtggggtccgggctgtggcggtggattctgcaggcgcgttggtcactggtggggtgaggtgttgggagtcatgggtgggcggaagggtgtggaaggcggtgtgctttgggtgcacggagtctaaggccgggatgcccgggtttgaatcgcagtgttgccacggatgggccttgcaggtgtgggcatatttcataacctctgtgtgccacggtttcctgaccccgaaaatggaaatatgagtgtccatttcaggggtccacaaactttttctgtagagagtcggatagtaaatcttttatgatttgctgataagaggtaaattcaaagggtaccatgtaggcatttaaataccgaaa

SEQ ID NO: 166 - DNA, 366 bp, Homo sapiens
attataacctgctatcttggggcaacttgggaagggtgacatgtcatacatcaaaagttggtctcctccaacatgctgtcttcatgtggagccctcaccacaatccctgactccggtcatttgtgcctttctcttgtcatctctgtacactacttatattcactgtgggttgggggagctaattttaagcatgttcagtggcagctcccctccagtttcagtgtcactgttaaaatttatcaaaaagcaacttcactaggggttttcttaagggataaaggccttttacagaagctaaacccttccccacatgtggtagaatgtgctcttctatatctactcctcaataaagcatgttctctgctc

SEQ ID NO: 167 - DNA, 1926 bp, Homo sapiens
tgcaatcctcaagatttgtcctgattctatttcctggcacctccctgcctgtccttggggattctacttcttcctgtgtgggagcccatagctgttgtctaacaggtaagaaatgaaattgaactattgactgggccccagaaatccataaaatggctgcagacagttgtttctgtgtcctgttctacccccactccagtacataactactatgtactgtgtagagccattctatatgctgaatgttctgctgttgcaaacttgccagggtattagccagtgtttgtgccaagcagttttctgggacaacagaatgactcagaccaagatggataggatggttagggctttgcttcttgctgtttttctttgaagctagttcattgtcctgcaggtcccttcatcttccatacctagcccactcttttagcccttaccttaaatctctcagataagttggttcacaaagaatgttaagtactgaatcatgtgtgactgagaccagagatggcaaatgaatggcacaccatttctccttctcctgccccagggcaggtaccactgatctgcatcagagttgcctgctattctctggtgtatccttcacatctaggtgccctcaagcagctgtgtgagtgttgagatctctgccatctctggctgagatactgctgtcctgtgaagtgtttcccatgacctttttcttcccctttgaatccctctgtctggagtagtccttgcctcttcctgctccagtagggccttttccctaccccagcccctgtgccaggctaagctggtacaagagctgccaacctcacagagtgtttgctaggcgagagaggtgcagggaagaggcagaggtatgcaccttcccccttgaagagaggggaaaggcctacagtggcccacataattgcctgactcacacttcagctacctcttaatgcctgtggagggactggagcggctggatccagtgtggtggtgtaggaggccaacagtgagcaggtggccccagctggtttcccaggtcaggaatgtgggccccaggcaaggtgcagcctttgctcacagctccatccatgtctagaccttcaggccagtctgcagatgaggttccctacctttttcttctcttcattgaccaaatcaaccaatcactacagctgctctgcttctgctttccaaagtagcccaggtcctgggccagatgcaggggaggtgcctatccatgagtgaaggccagtgtcttcctcacctgggtgggtcccacacttgtgacctcagttttaggaccaagatctgtgttggtttcttagattgctagcttttcctccaggggaccacagcaggtgaagctcaagagcgcatggctctgctaatagtaaattgttttcagggccttgtccagctgagagcttcatgtccaccagattctgagaggtgtcagcagcactttttttttatttgttgtttgttttccatgaggttatcggaccatgggctgagctcaggcactttctgtaggagactgttatttctgtaaagatggttatttaaccctcctccaccccatcacggtggccctgagggctgacccggaggccagtggagctgcctggtgtccacgggggagggccaaggcctgctgagctgattctccagctgctgccccagcctttccgccttgcacagcacagaggtggtcaccccagggacagccaggcacctgctcctcttgcccttcctgggggaagggggctgccttctgtccctgtaactgctttccttttggcccagcccggccactcagacttgtttgaagctgcactggcagcttttttgtctcctttgggtattcacaacagccagggacttgattttgatggattttaaaccacattaaataaagagtctgttgcc

SEQ ID NO: 168 - DNA, 1278 bp, Homo sapiens
tgaattttaataacattttagttatctcaatatgtacaaaatactataatttaaaaatgtaatccatattgaaaaattactgatataatcctttttgtactaagtgtatattttacacttatagcacatagtaattcagactagccagattctaagtgctcaaagctgtagcacagctctagggtacagtgaatcatgagagtctgtgtttagctgctcaaggggactacattcatttgaatgtttcagcttttatgtcctccaccatgaaatattctttgatcaacccagctgcaaatctttgcatcttcatggcctttgttactgttctttgggacttgacatattttatcttttattgattgatgtagcttgtgcaaagggcaacaggaaggattctcaagaatgttggaaatgaggacgggcaaattggcacattctaagagttaatttaattttttaaaattctagataaaatgaataagattatttattcatagatgtgtcttactctatgagatattttgtcagtgtgatactgataaagggctgggaaacactcaaattcatcattcactcctgataaacagagtagttctttaagactcaataattggccgggtgtggtggctcaagcctgtaatcccaacactttgggaggctgagacgggtagatcaccaggtcatgagttcgagatcagcctggccaacatggtgaaaccccgtctctactaaaaaaaaatacaaaaattagccgggcgtggtgacgggcgcctgtaacccagcgactcgggaggctgaggcaggagaatggcttgaatctggaaggtggaggttgcagtgagctgagatcatgccactgcatgccagcctcggcgaaagagcaaaactccgtcaaataaataaataaataaataaataaataaataaataaataaagactaaataatcatgggttcaatttattgagtaccggtcttgctgtatgccagtctgtgtgataagatcatttaatattcacaaccaccctataagggataagtgttggcccgttttacataggaagaaattgtgactggaactgttaagttggtgtgcaattctcacacagctgtttagaggcatatgtaagaggaaaattcaagtttgaccccaaagcctgggtagtaaatcattacactttacttctgatatatattcaaatgcatttataatctaatttattttattttattaaagtaatcatgtagatttaagaataatcctgaggagtaaggc

SEQ ID NO: 169 - DNA, 325 bp, Homo sapiens
gttatttctacattgttctacagcaagaatattcataaaagtatccctttcaaatgcctttgagaagaatagaagaaaaaaagtttgtatatattttaaaaaaaattgttttaaaagtcagtttgcaacatgtctgtaccaagatggtactttgccttaaccgtttatatgcactttcatggagactgcaatacgttgctatgagcactttctttatccttggagtttaatcctttgcttcatctttctacagtatgacataatgatttgctatgttgtaaaatctttgtaaaaaatttctatataagaatattttgaaaatctt

SEQ ID NO: 170 - DNA, 594 bp, Homo sapiens
tttgggcaaggctgggccgggaagggcgtgggttgaggagaggctccagacccgcacgccgcgcgcacagagctctcagcgccgctcccagccacagcctcccgcgcctcgctcagctccaacatggcaaaaatctccagccctacagagactgagcggtgcatcgagtccctgattgctgtcttccagaagtatgctggaaaggatggttataactacactctctccaagacagagttcctaagcttcatgaatacagaactagctgccttcacaaagaaccagaaggaccctggtgtccttgaccgcatgatgaagaaactggacaccaacagtgatggtcagctagatttctcagaatttcttaatctgattggtggcctagctatggcttgccatgactccttcctcaaggctgtcccttcccagaagcggacctgaggaccccttggccctggccttcaaacccaccccctttccttccagcctttctgtcatcatctccacagcccacccatcccctgagcacactaaccacctcatgcaggccccacctgccaatagtaataaagcaatgtcacttttttaaaacat

SEQ ID NO: 171 - DNA, 1061 bp, Homo sapiens
atgtgccctctggcagtctgctgctgtgtccagagtccgactccagctgggctgtaactgggcttggcccccgccttaggccccgccagcaggcgaagcagggagatgtcagactgctacacggagctggagaaggcagtcattgtcctggtggaaaacttctacaaatatgtgtctaagtacagcctggtcaagaacaagatcagcaagagcagcttccgcgagatgctccagaaagagctgaaccacatgctgtcggacacagggaaccggaaggctgcggataagctcatccagaacctggatgccaatcatgatgggcgcatcagcttcgatgagtactggaccttgataggcggcatcaccggccccatcgccaaactcatccatgagcaggagcagcagagcagcagctagagacccctttggccacaccttccaggcactggcctgatgccccgccctggtgctctccccaggctccctcctcagcctcctgcccacccagggccctttactctcttctccctccagaccttcctctgacccttgctgaactggggtccctttgtgagtgtctcagtctagaggtacctccctccctggggggtctcagctcctggagtcgcaggcccttggggcccctctgtgagatctcaatgctgtctggggaccctaagagttttctcacctgttcagtctcatctaaccttccaatgtctgatgttcctgccaaattcctgcctgattctgggtccgtcctgacctccaaaggtcagcttggtgcttgaggtctccctgctcttggtggcagtggtagcagcaacagcagcagcagcagcagcagcagcagcagagacctctccactttcccttagcccctctgctgggtagagaggcactttcagggacttccctccagctgcctcttcatctgggaatgagctaagcaaggctgagcctcctcctgttgcttgaaataatgatgatataaaggctggatttggagtttgtatcccctggtccctctgggatgctcattaaaaccttcccactccttc

SEQ ID NO: 172 - DNA, 347 bp, Homo sapiens
acattcgttgaaggacaccagctgcggaatttgcggctttggcagattgaaatcatggcaggtccagaaagtgatgcgcaataccagttcactggtattaaaaaatatttcaactcttatactctcacaggtagaatgaactgtgtactggccacatatggaagcattgcattgattgtcttatatttcaagttaaggtccaaaaaaactccagctgtgaaagcaacataaatggattttaaactgtctacggttcttaacctcatctgttaagttcccatgcctggagaagctaatgccaactcatcatgtgataattcaatttgtacaataaattatgaacctgc

SEQ ID NO: 173 - DNA, 694 bp, Homo sapiens
actctcctgtaaaacgctagagcggcgagttgttacctgcgtcctctgacctgagagcgaaggggaaagcggcgagatgactgaccgctacaccatccatagccagctggagcacctgcagtccaagtacatcggcacgggccacgccgacaccaccaagtgggagtggctggtgaaccaacaccgcgactcgtactgctcctacatgggccacttcgaccttctcaactacttcgccattgcggagaatgagagcaaagcgcgagtccgcttcaacttgatggaaaagatgcttcagccttgtggaccgccagccgacaagcccgaggagaactgagactctgccttaccaccgcagtgcggggcacctctcccagcgtttctccggtttgccaatcctcttaagtattcctgtctccaaaggaccggctctccatggctcctgcgcctcgtgctttccgcgtacagaagtgcttgcccggggagtcccgcctgacctgccttcatgtggacccttagaacagcactgggagaccagcaggactcctgagaactgtgctggtggagaggtcctagagccggcgagcgtttgagaagagggcatggcgctggagtgagatgggatttggcgtctcgtttttggctaattgattgtcattggctttttccataaagtttagaaatcgtaaaaaac

SEQ ID NO: 174 - DNA, 771 bp, Homo sapiens
  misc_feature 31: n = a,c,t, or g
attcttgccgctggcccagtcgctatgtagnggaggggcagacaccctcccgcaaattctggaaggttcttagtctcgactagggcagtagccccaggactcctagtcgccggcttcaggtcactgccggctgaacggagctgccgtcgccactgtttggctgcttggtggcggggaggctggtgcaaacagctgcacagcaagtggcagaggataaatttgtttttgacttacctgattatgaaagtatcaaccatgttgtggtttttatgctgggaacaatcccatttcctgagggaatgggaggatctgtctacttttcttatcctgattcaaatggaatgccagtatggcaactcctaggatttgtcacgaatgggaagccaagtgccatcttcaaaatttcaggtcttaaatctggagaaggaagccaacatccttttggagccatgaatattgtccgaactccatctgttgctcagattggaatttcagtggaattattagacagtatggctcagcagactcctgtaggtaatgctgctgtatcctcagttgactcattcactcagttcacacaaaagatgttggacaatttctacaattttgcttcatcatttgctgtctctcaggcccagatgacaccaagcccatctgaaatgttcattccggcaaatgtggttctgaaatggtatgaaaactttcaaagacgactagcacagaaccctctcttttggaaaacataatttgaataaaataatttttaatggt

SEQ ID NO: 175 - DNA, 552 bp, Homo sapiens
ggccacctcctctcccacatctcctgagaggcccaggcaccaccaccatgactccgactccaactccccctgctgtaagaggaggaagcggggacacagtggggacaggaggagcccgtctcgcaggtggcatgacagaggctctgaggcctgatggctggaccctgctcactgctgttgtgggaccctgaaccctcccttcaccttgcttgcctcctgcctcggaagctccttgggtgtgggtgaagcccgaggctgctcctgtggaagtggctctgggcaccagcctgtggggctaaagacttgacagctagctctggagcagccggcttcctggaaaacctccaggtttcgcataccagggatggcccctggcttggcctgcgaaggtgaacctgcccagatttatcagtagaggctggactccctctgtgtcctgcccatggttgcagcagccatgggcctatgagcggtctaactgtggccaagtatggtgacctctatttttctttatattgactctttgtatttcaataaatatattttaaaagc

SEQ ID NO: 176 - DNA, 401 bp, Homo sapiens
gccggctaaacgcgtgcgggggaggtggcttcttccggccgggccgagaggtggttacattcgttgaaggacaccagctgcggaatttgcggctttggcagattgaaatcatggcaggtccagaaagtgatgcgcaataccagttcactggtattaaaaaatatttcaactcttatactctcacaggtagaatgaactgtgtactggccacatatggaagcattgcattgattgtcttatatttcaagttaaggtccaaaaaaactccagctgtgaaagcaacataaatggattttaaactgtctacggttcttaacctcatctgttaagttcccatgcctggagaagctaatgccaactcatcatgtgataattcaatttgtacaataaattatgaaccc

SEQ ID NO: 177 - DNA, 396 bp, Homo sapiens
gtgtttggagctggagacggcctgggtgctggcgaagcggaggccggagtaagaagactgttagaatgccctcggtaacacagaggctgagagatcctgacataaatccttgtttgtcggaatctgatgcttccaccagatgtctggatgaaaataactatgacagggaaaggtgttccacttacttcttgaggtacaaaaactgccggagattctggaattctatcgtgatgcagagaagaaagaacggagtgaagccatttatgcctacggcagcagaaagagatgaaatcttgagagcagtgggaaatatgccctattgaatgtttgcattaaaagtgtttatataacttagaagcagatgaatatttctaataaatgattgctgtaatattc

SEQ ID NO: 178 - DNA, 949 bp, Homo sapiens
agtttccgagcggcaaggcagcgatggcgatttttagtgtgtatgtggtgaacaaagctggcggcttgatttaccagttggacagctacgcgccacgggctgaggctgagaaaactttcagttatccgctggatctgctgctcaagctacacgatgagcgtgtgttggttgctttcggccagcgggacggcatccgagtgggtcatgcagtgctggccatcaatggcatggacgtgaatggcaggtacacggccgacgggaaagaggtgctggagtatctgggtaaccctgctaattacccggtgtccattcgatttggccggccccgcctcacttctaatgagaagcttatgctggcctccatgttccactcgctctttgccatcggctcccagctgtctcctgaacagggaagctcaggcattgagatgctggagacagacacattcaaattgcactgctaccagacactgacagggatcaagtttgtggttctagcagatcctaggcaagctggaatagattctcttctccgaaagatttatgagatttactcagactttgccctcaagaatccattctattccttagaaatgcctatcaggtgtgagctctttgaccagaacctgaagctagctctggaggtggcagagaaggctggaacttttggacctgggtcataggctgaacctgttatggacccccaaattctgagagttcctgcaacaagaatactgctgttgacactccagtggaaatcccagcagccttgttagtgcacttgaaagtgggagaatgctgaccctgatgacttgtactgattcctgagccttaacactgtgctctttccttctgtatatgccatggtcttactttccaactctgtacagatttatttatggaggagctaggtccataaatgttgtaataaatattcctttgatcttgg

SEQ ID NO: 179 - DNA, 1067 bp, Homo sapiens
gccatcagtgtgggctgtgccgtggctggaagttactgtgaggcggcggctaagaaggcggctctggtggcggcggtggaggctgaggcggcggccgaggcggcgacggaggaaacagaagatggcagattttttgaaaggactgcctgtctacaacaaaagcaattttagtcgatttcacgcggactccgtgtgcaaagcctcgaaccgacggccctcagtctacctgcctacccgcgagtacccgtctgaacagatcatcgtgacagaaaagacaaacatcctcctgcgctacctgcatcagcaatgggacaaaaagaacgctgccaagaagagagaccaggagcaagtggagctggaaggcgagagctccgcacctccccgcaaggtggcgcggaccgacagcccagacatgcacgaggacacttaagactctcaactccacaggcgcctcctgccaggtctgctcctcggtcgcccacccgcctgcccgccatgtgtaagcaccccgcccgcccgcctccctgccggcccatccacaccctgcgtccacaccacttccaacctcataggagccgatgtatttattttccttgagtttttatttatgctgtaacctgtatcaagcgttggttaaaggggacatcagacccagtagtgtgatgttggtagatgctttttaaaaaaaacaacattgtccccccgacccccgccttccatcgggccagttccccgattcctgcccccagttctccagagaaccagagtgtgtctgtgagagtctctagcgggggctttactgtggccgggcgacaggggcgggcccggggtggcctgacctaccaggacagccgagtggccttctcccccccaacaccgatccaggccattgagactcggtcttgtcccaccttcgcccggaactttcccatgcccagacctcactcagcgtgcacgcacgttggggagaagtcggcccttgggatctttctcttgagtcattttatttttatcatggactagtgcgtgctccgtgtccaccccaataaaagggtctttcctactcg

SEQ ID NO: 180 - DNA, 675 bp, Homo sapiens
ggcacagccaggggcctgccgccgagacggctactggttcctaaagctactgcaggcagaaacagagcggctggaaggctggtgctgccagatggacaaggagaccaaagagaacaacctctctgaagaagtcttaggaaaagtcctcagtgctgtgggcagtgcccagctactgatgtcccagaaattccagcagttccggggcctctgtgagcaaaacttgaaccctgatgccaacccacgccccacagcccaggacctggcagggttctgggacctgctacagctgtccatcgaggatatcagcatgaagttcgatgaactctaccacctcaaggccaacagctggcagctggtggagacccccgagaagaggaaggaagagaagaaaccaccccctccggtcccaaagaagccagccaaatccaagccggcagtgagccgcgacaaggcctcagacgccagcgacaagcagcgccaggaggcccgcaagagactcctggcggccaagcgggcagcttctgtgcggcagaactcagccaccgagagcgcagacagcatcgagatttatgtcccggaggcccagaccaggctctgagaccatgcaggaggaaagaaacgattttaaatcattaaaaacacaaaaactaagtgcgaacggaacagagttttcac

SEQ ID NO: 181 - DNA, 581 bp, Homo sapiens
acttccggccagatcgccggatttccgctgagtgacccttacaagtccttcttgatcctgaactgggttaggtgccgctgttgctgctcgtgttgaatctagaaccgtagccagacatgggactggaggacgagcaaaagatgcttaccgaatccggagatcctgaggaggaggaagaggaagaggaggaattagtggatcccctaacaacagtgagagagcaatgcgagcagttggagaaatgtgtaaaggcccgggagcggctagagctctgtgatgagcgtgtatcctctcgatcacatacagaagaggattgcacggaggagctctttgacttcttgcatgcgagggaccattgcgtggcccacaaactctttaacaacttgaaataaatgtgtggacttaattcaccccagtcttcatcatctgggcatcagaatatttccttatggttttggatgtaccatttgtttcttatttgtgtaactgtaagttcacatgaacctcatgggtttggcttaggctggtagcttctatgtaattcgcaatgattccatctaaataaaagttctatgatctgc

SEQ ID NO: 182 - DNA, 931 bp, Homo sapiens
gggatctggagcagcagctgcaggatgagctcctggaggtggtctcagagctccagacggccaagaagacgtaccaggcatatcacatggagagcgtgaatgccgaggccaagctccgggaggccgagcggcaggaggagaagcgggcaggtccgcacagtcgaagccacacctggtctgttttctgtgcactgtagccttagtgtcacctttcttcttgtgtctccttatggtacactccagcggttgccttttttatcatttctactgaagttgggaaattcaaccccagaaattgacagatgaaaggagacaatggttgtgtagggagatggagaaaatgcttaatctgaggatgagacagggttttttcatttttgtgggggctagaaaaaacataaaatgaggcagttaaataataatagttaatgaaggtgtgctacagaaaataatctggtgttcttgctaactttgcccttcactgttgcttaattgtgaacagccaaaagctatatgttatggcttattgtgtgaaggtaactaagaagtggtgttccatgacttcagagtacatccatgcggagtccattatttgagtttgacatttaataactttgctggaaaatctgtaaaaaagaaaaacaagtttgctagtgactaagccccgcatatgtgagtgaaagtacttcaggcacgctgcctcctggtaacagctatgcagggagggaggacccacactgctacacttctgatcccctttggttttactacccaaatctaaatagatacttttgataatagataactgctcttttactaagacatagtctctacctatagaaatgtattttgaaaacacttattttacacagcaattttgtatccatttaaactaaccttttatcaataaagcactattgtttagatattc

SEQ ID NO: 183 - DNA, 1016 bp, Homo sapiens
  misc_feature 976,980: n = a,c,t, or g
agcagctgaagactctccacctataactgtatcgtgccacattcagatttttagaatgcccctcttgatctggccatatctacattaaatgctattttcttcaagcagtgagacaaagctgagagacgataggtttaaagattggttacaaattctgatgaagactggtccttgaagtctttgggctgttacatggccctttggaagcaataggtcatcactgtgaacaacttctgtaggtactggtttccatacgaagggaatacatcttgatgactttacatgaagtcttaactttatttgctgtttaatgtaagttggtcaagggtcttattgagcagaagaaacttgggaaatgaaagcactgttactgggaccacagtttttgagcctctgctgtcaatggaaacagacacttcaaaaatgctctccacggaggctcagaagagatgaaaagacaggaaaaggagctgaaaagatgaaaaaaaaaaaaaaaaaaaaaaaaggaaaatcaaggccttctacaaaacaaaaactttggacagcatcttgattcctcctccacctcttccatattagccttgagactctttctgaaaataaaaaggagggagttcttccttgtcataattatcccatccttagtgtaatcactatccaaaattagtctggaaccttctaaatcaattccatagttcttgggcaatattttgagaaattcgcttaatgtgacttgacagaatctctgggctggatggtattagagcgattacagtagtaccaacttcaggccaagccccaaagtgtaaaaatcgtgtttctgggctacattctgttatgccagagtttatatagtgctgggtaacatgtaagcctttttgaaatgaagtctcctaggaagattgaaaacatcagcaatcccttgataccaccagcaatccatctaccacctgtacattttcactaccccaatatncganctccttaagagaaaggaatttggttccctgtcacac

SEQ ID NO: 184 - DNA, 413 bp, Homo sapiens
gtttcatcttctgggattattgttcaagaccagcctctaatgggaggtgaaacggtacgatggtctcaacacctttcttctgaactgtaatacatatcacaaaaagtacatccataattcagggcaattgtcagtctttttagagaaggggccagggtggaacaatcccagtgagtaaattatttctcagcgtggacttctctgcatgtcgggcttaaggtcaccagccgggcagggtggaaggagcttgcctctttgagaaaccaaggagtcccagtgatctgttaccatttggttatgacttctaaagagccaaatgctattccttcaagcctgttttgcaggcagaaaataccagcagtgtcatttaggggttcctttgatgatgactactgctgttaactgacctcagc

SEQ ID NO: 185 - DNA, 961 bp, Homo sapiens
ttgatttataaatagttgtcagttcacatagcaatttaatcaagtaatcattaattagttaccccctatatataaatatatgtaatcaatttcttcaaatagcttgcttacatgataatcaattagccaaccatgagtcatttagaatagtgataaatagaatacacagaatagtgatgaaattcaatttaaaaaatcacgttagcctccaaaccatttaattcaaatgaacccatcaactggatgccaactctggcgaatgtaggacctctgagtggctgtataattgttaattcaaatgaaattcatttaaacagttgacaaactgtcattcaacaattagctccaggaaataacagttatttcatcataaaacagtcccttcaaacacacaattgttctgctgaagagttgtcatcaacaatccaatgctcacctattcagttgctctgtggtcagtgtggctgcatagcagtggattccatgaaaggagtcattttagtgatgagctgccagtccattcccaggccaggctgtcgctggccatccattcagtcgattcagtcataggcgaatctgttctgcccgaggcttgtggtcaagcaaaaattcagccctgaaatcaggcacatctgttcgttggactaaacccacaggttagttcagtcaaagcaggcaacccccttgtgggcactgaccctgccactggggtcatggcggttgtggcagctggggaggtttggccccaacagccctcctgtgcctgcttccctgtgtgtcggggtcctccagggagctgacccagaggtggaggccacggaggcagggtctctggggactgtcggggggtacagagggagaaggctctgcaagagctccctggcaatacccccttgtgtaattgctttgtgtgcgacagggaggaagtttcaataaagcagcaacaagcttcaaaaaaaag

SEQ ID NO: 186 - DNA, 712 bp, Homo sapiens
tgccaacatggtgttcaggcgcttcgtggaggttggccgggtggcctatgtctcctttggacctcatgccggaaaattggtcgcgattgtagatgttattgatcagaacagggctttggtcgatggaccttgcactcaagtgaggagacaggccatgcctttcaagtgcatgcagctcactgatttcatcctcaagtttccgcacagtgcccaccagaagtatgtccgacaagcctggcagaaggcagacatcaatacaaaatgggcagccacacgatgggccaagaagattgaagccagagaaaggaaagccaagatgacagattttgatcgttttaaagttatgaaggcaaagaaaatgaggaacagaataatcaagaatgaagttaagaagcttcaaaaggcagctctcctgaaagcttctcccaaaaaagcacctggtactaagggtactgctgctgctgctgctgctgctgctgctgctgctgctgctgctgctaaagttccagcaaaaaagatcaccgccgcgagtaaaaaggctccagcccagaaggttcctgcccagaaagccacaggccagaaagcagcgcctgctccaaaagctcagaagggtcaaaaagctccagcccagaaagcacctgctccaaaggcatctggcaagaaagcataagtggcaatcataaaaagtaataaaggttctttttgacctgtc

SEQ ID NO: 187 - DNA, 391 bp, Homo sapiens
ggaaacctctgcgccatgagagccaagtggaggaagaagcgaatgcgcaggctgaagcgcaaaagaagaaagatgaggcagaggtccaagtaaaccgctagcttgttgcaccgtggaggccacaggagcagaaacatggaatgccagacgctggggatgctggtacaagttgtgggactgcatgctactgtctagagcttgtctcaatggatctagaacttcatcgccctctgatcgccgatcacctctgagacccaccttgctcataaacaaaatgcccatgttggtcctctgccctggacctgtgacattctggactatttctgtgtttatttgtggccgagtgtaacaaccatataataaatcacctcttccgctgttttagctgaag

SEQ ID NO: 188 - DNA, 717 bp, Homo sapiens
aacattttccccccactcctcccttgatctttttggttttactttaattaagccctgcgagaatgctggataaatgccttgaagttagcagggtgtatttttttagcgaatatgatttgcatgtcttgccaggagttaagcggcctctggggtgttggggaaatactttatttctttccatttattttttgtggggcggggataggggagggcattgaagttctacaattctggaatagttagttgatggtacatagttaacttggcttcggttacatattggactttaacaactgaagaatctatgcgtgtcatttaaagaaaagttgcagaacaagcaattggcttagatatacaatctggaaaaatattcctgtgcccatattttaatgtaattgtataactgggagcaaaaatatattctgcttttcaactgtaggtgctccagacttgctctccgtcactaacactaaatgtgctgttttccttgtttttcatcaaacatttaagacaaacttagacctttctgtaaattatcttttaatttctcagcaaaatctaaaaggggaagaaaaaagtccatgaaaactaaaacttttcatgtttttagccagtgagaagataataaaccctgactgtagaaggtgtgttttcatgcaaactatacttctgagcttgttaacttctaattatatcttaataaatatattttattac

SEQ ID NO: 189 - DNA, 288 bp, Homo sapiens
gcccgtcatgctgtccgtacactacgtatgctgtagagccattttgtatgttgtgtaaaacaaaaagcattgatgaaaaagcaaaaggtgatgtatgtatatgagaaaattaattgtacgatatcattccagtacgttttgttgtacattttagtcttgtttactttctcttcattgttaagaggatgcgaactgtacagtttccagctagttacccatattagagaagaaataagagagtattagaagaaaacaggagagaaagaacatttgtgaattgcagttgtc

SEQ ID NO: 190 - DNA, 1001 bp, Homo sapiens
gagagatatgtcaagtcttgtttacagaaaaagcaaaggaaaccgttctcaagcgggaagaaacaggcagccaagtcgaaagaggagctagctcaggaaaagaagaaggagctggaaaagcgtctgcaggatgtcagcgggcagctgagcagcagcaagaagcccgcccggaaagagaagcccggctcagcaccctcagggggcccgtccaggctcagcagcagcagctcctccgagtctgggagcagcagctccagcgggtccagctctgacagcagtgactcagaatgaactggcttcggacagaacaggacagatggatgtcgcacacgccgagactctgccgtacccctctgtggttcatattactacttctgttccatggtgtgcaggtctgcctcctaattcagtgttatgatatcttccagtttttgctttcataggtcagagatctatcttgtgtgtggcgttagacttgatgagaaggtgtgaactctgcagaaagtctcttcttcatcactgaattcagtcacttggagatgacaacttcaaatgctaacccgatgaccccagaaaacagtgtgagattcgtaccgaagaaccttgtggaatccctttgcttaggcccaacctggtcgatagctcgagaaagaattttttccaaggaaatgtctcggatatgggtactgtatttgaaagctgttagctttgtcaacacgcattgtccttgtcatttgggccccgagctctgaccctcgtgtctgacgcggccacctctttctggaggggctgaggacagaatgtgcctgcttgtggaaaccaggctgggcctaagcgaagggtcatcgcagccccagcccggagcgtggagcccttggggggtggtcgggtgggatgtgcgttctccgctcgtggtgatgtcaggagctcctcggagggaacagagcggctgtgtatgcagcctgcaggtttccatacactgaagcttttacctcaacttt

SEQ ID NO: 191 - DNA, 1644 bp, Homo sapiens
ctttgaaggaaaaatgacccactatggctctcaaagtttttatgcatcatctcttcaatcctctaagaaagcctcttttcttaacttgataaagcagtggaaacccattttgcaatattgttttgtgaaaaacagggacagacagccaggtacagagactcacacctgtactcccaactactcagcaggctggggcaggaggattgcttgagcccaggagtctgaggctacagtgagctatgaacgcacacggcaccctagcctgggcaacaggttgcgaaactgtctcaagagaaaagaaaaagaaaaatagggataggttttccttcctagcccagtagagtttgacctcattagtatggtgctttgggtgaggacctcttccttgattatcccactttctagtgaacagctaaaattcctgagagtctctactgttaaggtacctttaataggataaagcagggaccacctatctcagtgggtccatttttcttttaaaattagttatctgaaaaaacttagcagtagttcccatctttaaggtaagtctttcatttggtccccattgtgtaaaatactaatcaacattttcaagcttctgtacaacagactgcttttgtctagatttctcaactccactttataaagcttatcagttttcagagaggaatgtgaattttttttctaatgcaaataaatggatatggcaggaactacagcataagtgattattgtgattctgggtggacggatataatttacaacatttagggatgttctaggtagcctgctgtagtttgacttccagtcactgttgtctttcacattataatttgtatatttcttgtgatagaagggatgatgcaaatatgtaattaaagtgtcaccagatttctgttaaaaccaaggttgaaataaaaagcctaacattggtaagctacattgttttctcattttagaatgattcagagatttcagatagacattttttaaactttaatgcttagctagaatctacattctgaggaaaactctaaaaaacttaaaaatttttagggaatttttatttttcaaatcataattttaaaatgatagataccattttgtgataacaacaattcagaaaacaattttctatcctcttagttgaaagaatgtaggtacagtttggatacttgtactttaattttagagtaaacatctgcattatactcttatagataatagaattatttagttaagaaattctttacagtaaatgagataatgtgtgaaaaagtattttgtaaatgctgaggattctacaaatgatagttgttattttcatgtgtatttgtaagatcatgtccatttcatgaatataggacttcacataaaaaaagactttctcaagacaactttatattctagtatttttctgttgtaaaaagtattaactatttacttttattttgttatacatttattttaatatccatgtgtttattatagtaaatttgaaatgaaatcctgaaaaacagaatttttttaaacacagacctcacaccaatattaattttttctctacataatttaaaactacataaattaagtacttaaaatttatattgaaggccaccaagaacttaggttgaatcttag

SEQ ID NO: 192 - DNA, 2231 bp, Homo sapiens
  misc_feature 1680: n = a,c,t, or g
ttctaaacatgcactgtcttattttattcccactataacactgcgaaataagcactgaccctacttgacgttcgagaaagctgtggttcaaagaagtgaatccacctatccaggggtacagaaggtagtaaggagcagagctgagattttaaacctgcattctttagagtagccccgttgtctccaggaggaagagcagcaaagcccagaaaatgcagctccacgtttgcctgttggtctgctcttttcctcctctattcacagtcattgacaagcttctcgatgccagactgaggtggcctctccggggacctggagtggtcgctgttgctcctgttttgaatgaggactcaggctcagggaggatctgtaactttcccaggccatgttgctagcaggtggcagagcccatctgactccttcacaccctggatcacccctgcctccctctctgggcttgtgtctcaatcctcctccctcagggagcaggagcaggatctgtggccagggagcacatggcggatctgtcccaagccagaccgccgacctcaatttgccttttagagccttaccccattccagagatagggcgtctccgagaggacacattggaggacatctggggtctcgaaatggccgtggttctgtcctgggcactcggcaggaaatgcagaggggcacttgggccagattcccataggtggccccaggaggacaggaatttaactgaggacacagcagctctcgattccggttctagtatccttggttgaagacagctgagggccaacggcttttttcctccaaaatagaattgtcagggcaccacatgctgaccttgctcctagcttcccctcatttgcggaaatgcagagagaagttgccgggcccccgtgggtctgtgctgagctgccctgtcgtcccactgccacgggagcagcatctaggcctgggaaaagtggggacagagtgggcggcaaagtgttctagacacactgggatctgaggagcaggcctggacacagctcacatgcgcaaaccgtgcacacgtggcccgtttctgttccttcacgcaagcagtgtccccagcacccgcaaaaggtgacgcccagatggatcccagagcgttcctgacggtcccccctccggctcgctgcctttctcctgatgtcgctgttgacagagggttatgtaacctcgaaggaagggaggcctggagttctccccaaagcggcgagtgaatcagtttttgctgccgtcattttctcagcaggaatctgctttatgcagattggatttaggggtttttcctggatgcttctgtttcatttaacatgcaagggctaataacttgtcacaattcaataaggcggtggttacaaacacccgggcggctgcttatttaaatgcaggtttgttaattagcttctcctaacaaggcgtgcgctaaatcaggctcccggctcgcagcacccaagcctggcacatctcccgggacgggaggtcgggaggttggctacagggtcacatccagtcactggcagcagggccagaattcaaggctaggaggcctgtctcagctactccattgcctcagtttccttcaaatcaaggcatcaatgacaaattgtaaaagcaactgcaagataaccacactctgtcccttcccttccttccttntctggttctcgttcttgcctttgattcctgaccccatcccccactccgagtgtgctgtgtgttctacgcaagccccacctcttccatgaaaccttcatagcttccttcaaccctgacaccctctccacttacatatcatcatctactcagtttggtagcaggttgcaggggtgctggtgacagggacagaagaaaaccaacaaagatggggcacctgctgtgggccaggggctgtctccataatccccacaacagcctgcagtcaggtgtccccaggctcctcctacgtatgtggacattgaggcccagagaggttgcatgaccttcccaaggtcaatgagagccactctggggttcaacctcctgctataactccaaagccagtgatctcttcccctcctggtgggcaggaagtgcttgaaaacagcatgtgtcggccagaccagcgtggtggcccactcctgcaattccagcactttgggaagccaaggcggggagatcacttgagctcaggaccagcctgagtaacgtgacaaaactccatctctacc

SEQ ID NO: 193 - DNA, 1155 bp, Homo sapiens
  misc_feature 1114,1119: n = a,c,t, or g
catccatgtaagatatgacttgctcctccttgccctctgccatgattgtgagtcttctccagttatgtggaacgctgttactgcccttagacttgaagggacaaggagaaggagaagatgcaggaagaaaaggaagttctctgtaacagtagcagcagagccagcccaaaataacttcaaggagatggagtctgggagtcaacatgctggcctcactctctttcagccctctgattccctgccagggattccccatgggtcaaagccaatgggatgcctccttctgaagccacaggagcctgctgatagagttcagagaggacatcctccccaggcagagaacagcgtagaaaagtgaagaatggatcagttggagcaagtctgaagtatctggcacaggaaaaaacagggtagagaatacggcacacaggaaagtgtaccccgaagaagctttgcacatcctctccttgaccagatatagctgtgtgaccttgggccgatcacaccacttctctgatttacagattttttttcatctggcagctgctcaagttcctaaagaatatatatgaatgatacttcgagcaccttgtttcccaggaatgaagagccaggaaaagcctcgagtgctgtgattggaaatgagctagccaaaggcagattcaccattaaaatgtgaatccgttattccacaaggaaagaaaacaacaccatgtacgctagtggtaagtagaaatgccatcacatttggggcatgaaaaccggaggcaatactcgcagtgaaacaaactgtcaactatggctggaaaatccaagtgacctttcaaataaggaatcgttacctacccaggtggacagtaattttgagtggttcttagtctctgcctcaggtgagatttctggcagcagacacagcatcacatgtcttgtttcttttatcccaaaaattctcccttcacaatgatgaaaagttgaaagaattgggtttttttaaaagacaaaaggcctatactccatacaagctttgtaactgctgaatcctgtggcctgggatgcgggacttaacctctgagcttcagtcttctcaactacaaaatggggataataacagccnctttnttgtgttactgaaacaataaaatggaaaatgttcac

SEQ ID NO: 194 - DNA, 1528 bp, Homo sapiens
tggaaaagtggttctttggaaaggagatgtggcattactgaactgtacagccattgtgaataccagcaatgaaagtctcacagataagaatcctgtgtcagaaagtatcttcatgcttgcagggcctgatttgaaggaagatctccagaaacttaaagggtgccgaacaggtgaagcaaaattgacaaaaggattcaatctagctgcccggttcatcattcacacagtgggacctaaatataaaagccgctatcgcacagcagctgagagttccctttatagctgctacagaaacgtacttcaactagcaaaagagcagtcaatgtcttctgttggcttctgtgtcatcaattctgcaaaacgtggttatcctttagaggatgcaacacacatagcacttcgcactgtaagaagattcctagagattcatggggaaaccattgaaaaagtagtatttgctgtctctgatcttgaagagggtacttaccaaaagctgctacctctctacttcccaaggtcattaaaagaggagaatcgatcattgccctacctacctgcagatattggaaatgcagaaggggagcctgtggtacctgaacgacagattagaataagtgagaaacctggtgctccagaagataaccaagaagaggaggatgaaggcttgggagttgatctctctttcattggctctcatgcttttgctcgaatggaaggagatattgacaagcaaagaaaactgatccttcagggacaattatcagaggcagctctgcagaagcagcatcaaagaaattataatcgctggttatgtcaagcaagatctgaggatctgtctgatattgcttctctaaaagccttataccaaacaggtgttgataactgtggtcgaacagtgatggtggtagttggaagaaacattcctgtaacattaatagatatggacaaggctctcttatatttcattcatgtaatggatcacattgctgtgaaggagtatgtattagtgtattttcacaccctgaccagcgaatacaatcacctggactccgacttcctgaagaaactctacgatgttgttgatgtcaagtacaagaggaatttgaaggctgtttattttgtacatcccacatttcgttcaaaggtgtcaacatggttttttaccaccttttctgtctcaggactgaaggacaaaatccaccatgtggacagcctccaccagctgttttctgccatatcaccagaacagattgactttcctccttttgtccttgaatatgatgccagggaaaacgggccttactatacatcatatcccccatcaccagatttgtgacctgccatctttcagtgcttcttggttcccaggatgccacttcctccacgaatagctacctgttgaagtgatattcattgttgctgtacagatccagagagccttttgtccccacctctctggtatttttttattgactgtatattttctggcacataagcaatctaaaaatggtaggccattctgaactgc

SEQ ID NO: 195 - DNA, 624 bp, Homo sapiens
  misc_feature 478: n = a,c,t, or g
ttttaattttagtttcatgagtctttattttttgttacctgcaagttatgttcttcttcattgaatttcatatttgagagacatttgtcttcatgaagcagatttgcactggaaccattgctttactctggttggaaatgccattgttttggggacagacttttaaaatgcccttgtgtctcccagtgaggagccctaagcattgacttctctaccctaaaactgtttgagagagggagagtgggccctggctttctcaagcatgggtcgggggttcagcggggcctctgtcttttgtggtgacccctcaggggtttcattgtttccttctgacttaagcaatagagagagaatttgttttggtactcttcagaggaattgtgctttggctcataacttggccatgttctccatgaaaaaattctcctatttttttttttttaactaccttaaacttaagggaaaagttctcctatcntgatttcactggaatataggctttaggagctctgtaaggctggtatttttgtctgttttatcttcttctgtatcgccagtgcctggaacagtgtctggtgcacataataggtgctcaataaaaatgtgttcaatggatgaatttcg

SEQ ID NO: 196 - DNA, 417 bp, Homo sapiens
cctgagccagcggggcctggcctacctcccccatcccctgcttcccttggaggcagagggctcccttgactacctttgttcctcttctttgaacactgacccttggacaacatttatcataatttgtcataaccactgctgagtggccttgaggacgaaccccgcagggagcaagcagtacagtggcattcccagggggaccagcagctacccaaggagaaccatgcatgaacagtatcagtcgtctgggctcatgctgggatgtcgcagtgctcctgttgcaactcctcccagccagccaggtttgctgggggccaggctgggtgtcctcacaggagtgagggctacacccaattccaaaagcctgagaagagagaagtggagggggaggcgagtgtgtgaataaaggctcccaac

SEQ ID NO: 197 - DNA, 328 bp, Homo sapiens
ttgggatcatggaattggccgttgggcttacctcctgcttcgtgaccttcctcctgccagcgggctggatcctgtcacacctggagacctacaggaggccagagtgaaggggtccgttctgtccctcacactgtgacctgaccagccccaccggcccatcctggtcatgttactgcatttgtggccggcctcccctggatcatgtcattcaattccagtcacctcttctgcaatcatgacctcttgatgtctccatggtgacctccttgggggtcactgaccctgcttggtggggtcccccttgtaacaataaaatctatttaaactc

SEQ ID NO: 198 - DNA, 337 bp, Homo sapiens
ttttttttttgaaaatggattcaatttttattaaataatgtaaaggattttcttggcactattcacattctcttgcctgagtaaaacaagccgcgtttatctgcattggtagcagagggaaagctactggagcaaacgctaagtgaatgggttcccgtgccgagggtgtcctcattcttgggctctgtcaggcctccccttgtctgcaggactggacaggccaccctccccaggccctgcccttgccgcgagcgtgtccttccatacagacaacagccttgctgggtcacctggaggagctgcgctctttgctgacacagtcgtcctgggaggtgaa

SEQ ID NO: 199 - DNA, 573 bp, Homo sapiens
gaatagttacggtcggaggccgatccaggtcatgatgatgggcagcgcccgagtggcggagctgctgctgctccacggcgcggagcccaactgcgccgaccccgccactctcacccgacccgtgcacgacgctgcccgggagggcttcctggacacgctggtggtgctgcaccgggccggggcgcggctggacgtgcgcgatgcctggggccgtctgcccgtggacctggctgaggagctgggccatcgcgatgtcgcacggtacctgcgcgcggctgcggggggcaccagaggcagtaaccatgcccgcatagatgccgcggaaggtccctcagacatccccgattgaaagaaccagagaggctctgagaaacctccggaaacttagatcatcagtcaccgaaggtcctacagggccacaactgcccccgccacaacccaccccgctttcgtagttttcatttagaaaatagagcttttaaaaatgtcctgccttttaacgtagatatatgccttcccccactaccgtaaatgtccatttatatcattttttatatattcttataaaaatgt

SEQ ID NO: 200 - DNA, 1701 bp, Homo sapiens
gaaggaaaagagcctggagaccttaaattcagcaaaggtgacatcatcattttgcgaagacaagtggatgaaaattggtaccatggggaagtcaatggaatccatggctttttccccaccaactttgtgcagattattaaaccgttacctcagcccccacctcagtgcaaagcactttatgactttgaagtgaaagacaaggaagcagacaaagattgccttccatttgcaaaggatgatgttctgactgtgatccgaagagtggatgaaaactgggctgaaggaatgctggcagacaaaataggaatatttccaatttcatatgttgagtttaactcggctgctaagcagctgatagaatgggataagcctcctgtgccaggagttgatgctggagaatgttcctcggcagcagcccagagcagcactgccccaaagcactccgacaccaagaagaacaccaaaaagcggcactccttcacttccctcactatggccaacaagtcctcccaggcatcccagaaccgccactccatggagatcagcccccctgtcctcatcagctccagcaaccccactgctgctgcacggatcagcgagctgtctgggctctcctgcagtgccccttctcaggttcatataagtaccaccgggttaattgtgaccccgcccccaagcagcccagtgacaactggcccctcgtttactttcccatcagatgttccctaccaagctgcccttggaactttgaatcctcctcttccaccaccccctctcctggctgccactgtccttgcctccacaccaccaggcgccaccgccgctgctgctgctgctggaatgggaccgaggcccatggcaggatccactgaccagattgcacatttacggccgcagactcgccccagtgtgtatgttgctatatatccatacactcctcggaaagaggatgaactagagctgagaaaaggggagatgtttttagtgtttgagcgctgccaggatggctggttcaaagggacatccatgcataccagcaagataggggttttccctggcaattatgtggcaccagtcacaagggcggtgacaaatgcttcccaagctaaagtccctatgtctacagctggccagacaagtcggggagtgaccatggtcagtccttccacggcaggagggcctgcccagaagctccagggaaatggcgtggctgggagtcccagtgttgtccccgcagctgtggtatcagcagctcacatccagacaagtcctcaggctaaggtcttgttgcacatgacggggcaaatgacagtcaaccaggcccgcaatgctgtgaggacagttgcagcgcacaaccaggaacgccccacggcagcagtgacacccatccaggtacagaatgccgccggcctcagccctgcatctgtgggcctgtcccatcactcgctggcctccccacaacctgcgcctctgatgccaggctcagccacgcacactgctgccatcagtatcagtcgagccagtgcccctctggcctgtgcagcagctgctccactgacttccccaagcatcaccagtgcttctctggaggctgagcccagtggccggatagtgaccgttctccctggactccccacatctcctgacagtgcttcatcagcttgtgggaacagttcagcaaccaaaccagacaaggatagc

SEQ ID NO: 201 - DNA, 1169 bp, Homo sapiens
  misc_feature 149,337,341,694,791,845,907,1103,1115,1128,1141,1145: n = a,c,t, or g
aaccaacccaaaccagtgaagttttttagaacctttagaagggtggtctttattcaggttttactgtaatggtaaggattgactcaagagacagtattagtaaatttattgtgtatggatcaaaagtgaataatgtatgaatgagagcngtaagaaggatttttattttgttataatttagttaccattttcagtgttatttcaaaggttctttgaagaattttggggcagggcatcagattagagttttaaaatttgagtattttggatatcagtgttcctcatgaagatatacatggatattcaattttgatggcttccagatttgtaagattgnatgntgtatataccattctattaagaaacatgtccactgtgctttcaaacatagataaagcatgataaagattattatttaagatatacttgtatttatacctcagatattcttttgggttttgtaccgcaaggcttttttcttcttattgtaaatacactttacgtgaatacagtctaagtgaagaaaataaataaaaggaagaggtttataacttgctctatatctgtacagattataatcaataagtgcactattattaaatgtttaaagtaagggaaaagtctgggctgccttccttaatattgcatctcactcccacccttaaaaccacagattgcaaagcatagcattttngcatcaactacaatcaaaagagcgatttgctgaaggaaaaatcggactgcaaatcattccaaggccaaactgcaactgagccacccactcccaaacnggaaaccctggtgaaggttcaggaagcacggagattctctccaacaaaggtccngttaggaaacgacgctgagaggatgacgacaacgtgcaacagcagaaagatgcttgcaagcngagtcagggtcaccagtgaatgccacaaaagttctctttcccactgtttaatttgacaagagaagaatttgaaggatatgaacattttcaagaactctgctgaggtcacttagagcgccatcacaacttatttgtgtgactaattgcctagattgtaagctctttgagggcagggcttgtctcttacacatctttntaatcccctgcngcggctttcagtnttttgtacttgtnggcncctaataaatttattatttgctat

SEQ ID NO: 202 - DNA, 1975 bp, Homo sapiens
caatgaaacattgcttaaaactgtttgcgcagtggactagaaatggggagttggggactaggggacctgattcttgttttatgttcaaaggagagtgaagcattctctccattaagaaataacctccttaagtgtattctcactttggagttttgccactcattcattcacctgacgatgattaaagatataccacattctgggcatgtactaggtgctagagtaacaaatcttgggccttgtcgtgtagagcagaaaggtatgggctcaactagctatgttacaacttctagagaaccaaaatagagcaaacaaagagtggtgtgggattataggaggagggagaaattccttctagggagaggagaatgatacacagagaaaagtgaggttagggaagacttttcacataggggaagtttgagtaggacttggaagggggagtagctgcattactgatggagaagaggggctgagaggaagggcatcagtagtctgatttgagaactagcaagtggattttgctcgacttggagaatagtggaaagtgaaactgataaggttgtggccatattgggaagagtttgtaattccatgctcatgagtgtgaactttattctataggcatttagggaccataagaggtttgagtaggacatccactatggtttttaaaaagatgacatgtaaagatttgactagagacttgtgagagtattgaattgtgatgtaaaaggacatcgattctggggataatttttacttcacagttgtcagatttgagtgacaattgagtaaagagttaaagattatagtgtggttattgggtgatgatgatgcctttaagatagggaatgtataggaagaacagaatttgaggaggaaggtaatagagtatgactccagatgtgttaagatatctgggaatcaagaaaggtcaagtaagtacctgggtatttgggctggagctcaaggggacattgggataaattaggggatttgcattcatcagtataatgccatatagaaactgcagaaagccaggcatggtgcctcacacctgtaatcctaacactttaggaggccaaggcagaggatcacttaaggccaggagttcaaaaccagtctgggcaacgttgtgagaccctgtttctacaaaaatttaaaaaatttgtcaggtatagtggtagccacctgtggtctcagctactcgggaggctgaggctggagtatgacttgagcccaggagtttgaggctgtagcaagctatgatagggccactgcactccagcttgggtgtcagtgtaagaccctgtctataaaaaagaaagagaaaatagtacagattgagtatcctttatccaaaatgcttaggaccagaagtgttttggagttttttttgactttgtaatgttggtatacatataatgagataccctggagatagggcccaagtctaaacttgaaattcatttgtgtttcatatacatcttacaacctggatgcagttttatacaatattttaaataattttgtgcaggaaacaaagttttgattccattctgactgcaacatgtcacctgaggtcaggtgtggaattttccacttgtggcatcatgtcaacactcagaaagtttcagattttggagcatttcagattttaaacttttggattaggaatgcttaaccatatcaggagtgaagaaaaaaaactaagggcaaccttgaagagcatctacatctgagggtcaagtagaagaatagaaacctatgaagtaagttgagaaagaatggctaaacagataaggttatagggttgaagaagctgaagagagggattaagtgaatactgacagggaagttagccgtgtgaaataccacagagttcattggtttggagggcaatgccggaggatcgcttgaacccagcacttcaagaccagcctgagcaacatagcaagacctcgtatctatt

SEQ ID NO: 203 - DNA, 440 bp, Homo sapiens
ctcacttttatctgagacatcttctcttcctggaatgacctgggatcccactttaggcatgttggcagcaataagaaattcagcctgagcctgactttcacagactcatttggtcccagttttctgtgtccaggcaactcacctagtgttttctgccaccctggcaaactggctgccagcacatcacactacgtatgtttgtgggttcatatgtgtccacgtgcagaatctgcccatttcctggatcatcctgggccatctggggaagcctttttaattttttcttttgcctcctgcctttcaagcttctcttttgattcttgtggcttgtagtccaacaagagtagaaggaaagagcttcaggaagtgaggagtttattaaaattcctttgaagcatttcaattcagtaagaggaactatcttttctgttagctaagac

SEQ ID NO: 204 - DNA, 981 bp, Homo sapiens
tgcaccctttgatagacaccatgttcgatatctgaaaggctcagtgtcaggagacagagactgagggagactgaagacctgattctctgttccctgcttgttttttaacttcaaactcagatgaagccaatggacctgctgaaacacttgtctgtggaaactgggtcaggtcgggagatctactgaaatttggctttttttccatagccacgtgccttctgttgttgacagttcattcattaccaaagcctgtgtgtaactttgccttgttctgtggccatcttcttgctcatgttatttctcctgggaatgagcagtttgacttctgttcccacgttcctcattctatcagctctagatggattttgcctgcatagctggcttaatatgtctttgtgtatgggtagtctgtagcctgagaatatttacctaaaaatgtctaaacagccaccaagaatgtttataggggtataggaatatagttaacagagtgctaatctctcctcaaatgtccttttggaatgcttcccccaaaattgggaagttggtaggagcttttctttactttgaatttctttacttggacagaacgattctgccttaaagacacgctttgcagctctgataaagaacatccctgtttagtctcttgagttttacaggccacaaaatgtccgtctcagagggatctgtctcagcttttcttatttttgcttctctccgttttcaaaattaatcatcttgttctctgtataagaaaatttgagaagctgtggacaatttaatagtctgatctggcaacagcgatttttgtttggaaatattttgtgttttctttgaggaggatataattactgatatcctaggatgtgaaatttttgagtgacagtatgcacattttaaagaaaattatgattaatctgtataatgttttttggtttgtaaaaattataaaaaataaaatcatttatctttggttgt

SEQ ID NO: 205 - DNA, 1615 bp, Homo sapiens
ggcattgttctggtgggtgtgtcacgctcccagaagactgaattcatggtaggatcactcgcaaggccttgtgaaggagtcttacctaaaacgaaagaaatatcagggacttttgttgactatttacaactcagttttacatttaaattcaggcagtgttaatatgccaaggtagggaatgtgcctttttcagagttggccaggagctcctggctgggacacggagaggcaggtgtggcgtaaggcctcactcccggctgggaaggtctctgatcacacagaagcagccctgcccagcctggtcatttgctgtccgcttttctctgtgaccacagcagccctgaacaaccagtatgtgtcttcttctccagatagtgaaaaaggtgtccagataaacccacctaagtgaatggccatcctctaaactgggtacctcactgcacagcttctaggtagccttccaacttaatctaacttgagcctcacagtaaccctgtaaagttagtagagcttgttcttgtattgtgaccttttttaaaaaaaaggaactgaggttcagaatgattaagggcctggcccccagggttgtccagctccataaggtggagctgggcaagattttgggtttgctgctccctgaagctggattctttcatacgatactctttctcaagaagggggctccctgggatctccaggtgtactgcacttaccctcaatccagccccggagaagcaagtgaaaagggtgggtccctcataggctagaatgtgcagctctttctccaggtgggatgtagcaccccgaagtagagctttctgctctgctcctggaaaaggctagggagctggggctggggctcccctcccatgaccaggcagtggtcaccccatgggacaggcacagctacttacgcgaacacagcaggttggtgtggctggctaactaggacctctcgaaagtctctgtgggggcatgagggagaaaaggccattgggagaattactgcctttactttgggactacttttatgctgataacttgggatttcttgatagtccttcacccctgaaaccccgtatttacttaacaagatttagctcttagttcttcaagtaaaattaaagtctcttgtgtaagagccaacacatgcccagctgcggatgggagctgttcctggacagccttctactgcctgggaagtgatggaacaggaactcagggtgcccttaccccctccccagacctgttccctttctttgactgacagagcaccatccaggcaaaattagagcgccaaatggttttcttctcaatcttaaagcagtatacctttccacaggctcgtctgtgtccctgccactctgagttatccagaaaccaccacctacaaatgaggggactcatctagaagacctctaaggtccccttttggctctgaggggtctctaataatccccacttggaattcagcaccgcaaggaaattatgggtatgtgagccataatatgatgggcagcaggtggcgctgccttccacccatggtgatggatggtttggaaagggaatgttggtgccttttgtgccacaagttaagatgctactgttttaaagg

SEQ ID NO: 206 - DNA, 648 bp, Homo sapiens
ctttcagcaactttttaaatattgacccgataaccatggcctacagtctgaactcttctgctcaggagcgcctaataccacttggtatgtattctgaaaatctgatcacagtaagcatttgagaagaacagtctggattcgggttagcttgtcctccagcattattttttaaatgaggaaacctgaactatttccaacaacagcctgacccctagtggcaacagattcagaagataactgtgtttttctcaagctattgtactcgactgccttcattctgagtcactgattgctaagtaggactgttcatggacgtgggatcttctaaaatcaagaattagttctcattccagctctgatgcatactttacttcatgaaaccttaggcgagatttcccacctttcttactagtatcgaatgcatgtttgacagtaatagatgaaaatagtataaatgttcctcaaaacttaaaaaatagtatttttaatgtgaatattctgttccttggatctttgtcaagagctgtgtgtgaactgaacacattgcaggcaagtccattcactcacaatattatgatgggccagcaataaagctatgtctgatattttccttcactaatatgaataatagcatgcttttattttacc

SEQ ID NO: 207 - DNA, 610 bp, Homo sapiens
ctttctatttattcccaaaatggagtcattcatcctgatgtcctcaattgctgctgatatgctggtgattcccaaatacatagctccaacccccaacttcccccagactttagatctgtattggtattacctactggacatctctatggacagttccgtatagactcaactcatctgcccaaccaagtatgttcctcctgaattcctctcctggttacttcatcacaatctacataggctcaccagctagaaacatttatgagcttacattccttcttcccatatcttatcagcatatcatatccatttcactccaacactctgtcttgaatttggccctccctctcccctctctactttaattcattggagcatgggatttggagttaggtggttttgggtttgaattccagctctactatttttggttgtgtgatagagttatttaacctctctgagcctcagttccctcgtatgtaaaatgatgataataatacctacctcacagggttgttgtgaggatttaaattagatattgtacgaaaagtgcctagcacagtgcctggcacacagtagagtaggtgctcaataaatggtagctattattatt

SEQ ID NO: 208 - DNA, 2454 bp, Homo sapiens
cttgagtttctaatgcaaattcagttccaagcagtgtgacctggttgtttaactcctttgagccacccccgcccatggccctcatctgtaccctgaggataatagtgtgggctttgcaggcttttggtgagcaagtgagatgatgtagcaaaacacccagcccagagcctagcaccaattggtctgtaatccatgctgcacggacacagccattctctggatgtggcctcttctgcctccactgtgaggtcagagactgagtcactgcaggagtaacctctccttggcaagcagcgggagtcatttcatcccagcctttcaggagggtgaatctgcacctggggtccagagtctcagagatgagacgtgagccaggcgctgattcatcatgatgcaggctgtggagactctagccatggtttctccatgcaggagtgaggttgggataaggggtctttctgggggctctgtgctctgtggcccctgctgctccggactggttcattggagaaacctgtcacattctctagaccggttgccacgccatgctcacagtctctgttcttgccttcctaggtgggaagtgagtgatgaccctgaagtgaggactcatctctagatctccaagggctgcagctcagccagcactttacaagggtgatctggagccaaactggcctgttggctgaccataggtgactctgggtagcccatacccaggctcagcagcagttggggagctgcctcgatttctggttacagaattcctggaactgagtcactgcagtaattgctgtgatgaattgtgtttactttgtgtgggattccaaactgtagcagcagtgactacagctggaagacagcatgatcagcagcttccaaggcagagcctggcgtcagaaagctgcattgcgctaatgctgaagcctgtgggagcctgttggagagacacttggatgtttagcgagctggtgactctccttgtcatgagtaagcttaggaccttgggcaagtcatccaaactcttctgggcaagtcattctcctgcttggatgccttgaggcagagaggcagtgaggtgaagtggtcagtgcgtcgactctgcctctagcctgctggggtttgaatccacctgtgtgatgttgtatgatattgacctttctggctctcagcatcctcttgtgtgaaataggagattttaacagtatctatttcgtagggttggtgtttgaatgagttaacatatgtaaagtgaatggtacagtgcctggcttcctggcaagattgctatcaggattaaggcaggttaagcccttggcacacactaagagctcaataaatgtgagctgatgttattggtcctttattactattcaagaagcctgcccagccctcctccctctccatccacacagcagcctggtacccgctgttctctaggttctggacacacgttatgacatgttctgatgatctggcttagacagtggggccctcgaggtaggcccagaggacttggtcctcactgcctctgtggcgccttgcactgggtccagctgacgtggagagagactcaggaaacagtggctgagtgtgactttggctggcatagtggttgctgagagaacagacaaggttctctctcacgacatacagatttcagatcagggaaagtcccagctggcataagtttatcgagcatctcccatggacaagatcagctgtgggtggagccttgaagtacatggtagaaggacagcgagtcttcccaggccagggcttcaagtgaggagacaagatatagcctcccagagaattcctataatgcaatcgtgaaagaaccatacccagcaggaggccggggaaagtgactcctgcaactctaggaaggcttcctggaagaggtggaacgtgagcagcataggattttgagagaagaaatggaatgggctgagggagattctgctggtggaggttcaggttgacctaagggctggcagcagtggagcccccccacgagtgagtttgaggggcctctttagctcagtccagttgaggcagcagagcctttccataggggtgtggtgtgacctgaatgttgggcacgtggtcgtaactgagctttaaaagtgaatgagaggagccatgcgtgatggctcgagcctttaatcccagcactttgggagatcaaagctgggggatcacctgaggtcaggagttcgagaccaacctgggcaacatggtgaaaccctgtctgtactaaaaatacaaaaatcagttgggtgtggtggtgggtgcctgtaatcccagctactcaggaggctgaggcaggagaatcgctccaacctgggaggcagagactgtaatgagccaagattgtgctgctctactctagcctgtctcaaaacaaaaaacaagaaacaaaaacaaaacaaaacaaaaaaacactgtctc

SEQ ID NO: 209 - DNA, 1967 bp, Homo sapiens
  misc_feature 1949: n = a,c,t, or g
gcattctgaagaaagatggctgagatggacagaatgctttattttggaaagaaacaatgttctaggtcaaactgagtctaccaaatgcagactttcacaatggttctagaagaaatctggacaagtcttttcatgtggtttttctacgcattgattccatgtttgctcacagatgaagtggccattctgcctgcccctcagaacctctctgtactctcaaccaacatgaagcatctcttgatgtggagcccagtgatcgcgcctggagaaacagtgtactattctgtcgaataccagggggagtacgagagcctgtacacgagccacatctggatccccagcagctggtgctcactcactgaaggtcctgagtgtgatgtcactgatgacatcacggccactgtgccatacaaccttcgtgtcagggccacattgggctcacagacctcagcctggagcatcctgaagcatccctttaatagaaactcaagaactgcctttcttctgagtgtccacttgtgtccggaattggtgggttcttgatctcactgacttcaagaatgaagccgcagaccctcgcgccatccttacccgacctgggatggagatcaccaaagatggcttccacctggttattgagctggaggacctggggccccagtttgagttccttgtggcctactggaggagggagcctggtgccgaggaacatgtcaaaatggtgaggagtgggggtattccagtgcacctagaaaccatggagccaggggctgcatactgtgtgaaggcccagacattcgtgaaggccattgggaggtacagcgccttcagccagacagaatgtgtggaggtgcaaggagaggccattcccctggtactggccctgtttgcctttgttggcttcatgctgatccttgtggtcgtgccactgttcgtctggaaaatgggccggctgctccagtactcctgttgccccgtggtggtcctcccagacaccttgaaaataaccaattcaccccagaagttaatcagctgcagaagggaggaggtggatgcctgtgccacggctgtgatgtctcctgaggaactcctcagggcctggatctcataggtttgcggaagggcccaggtgaagccgagaacctggtctgcatgacatggaaaccatgaggggacaagttgtgtttctgttttccgccacggacaagggatgagagaagtaggaagagcctgttgtctacaagtctagaagcaaccatcagaggcagggtggtttgtctaacagaacactgactgaggcttaggggatgtgacctctagactgggggctgccacttgctggctgagcaaccctgggaaaagtgacttcatcccttcggtcctaagttttctcatctgtaatgggggaattacctacacacctgctaaacacacacacacagagtctctctctatatatacacacgtacacataaatacacccagcacttgcaaggctagagggaaactggtgacactctacagtctgactgattcagtgtttctggagagcaggacataaatgtatgatgagaatgatcaaggactctacacactgggtggcttggagagcccactttcccagaataatccttgagagaaaaggaatcatgggagcattggttttgagttcacttcaaccccaatgccggtgcagaggggaatggcttagcgagctctacagtaggtgacctggaggaaggtcacagccacactgaaaatgggatgtgcatgaacacggaggatccatgaactactttaaagtgttgacagtgtgtgcacactgcagacagcaggtgaaatgtatgtgtgcaatgcgacgagaatgcagaagtcagtaacatgtgcatgtttgttgtgctccttttttctgttggtaaagtacagaatttagcaaataaaaagggccnccctggccaaaagcggtc

SEQ ID NO: 210 - DNA, 1682 bp, Homo sapiens
gaacagcgctcccgaggccgcgggagcctgcagagaggacagccggcctgcgccgggacatgcggccccaggagctccccaggctcgcgttcccgttgctgctgttgctgttgctgctgctgccgccgccgccgtgccctgcccacagcgccacgcgcttcgaccccacctgggagtccctggacgcccgccagctgcccgcgtggtttgaccaggccaagttcggcatcttcatccactggggagtgttttccgtgcccagcttcggtagcgagtggttctggtggtattggctaaaggaaaagataccgaagtatgtggaatttatgaaagataattaccctcctagtttcaaatatgaagattttggaccactatttacagcaaaattttttaatgccaaccagtgggcagatatttttcaggcctctggtgccaaatacattgtcttaacttccaaacatcatgaaggctttaccttgtgggggtcagaatattcgaggaactggaatgccatagatgaggggcccaacagggacattgtcaaggaacttgaggtagccattaggaacagaactgacctgcgttttggactgtactattcactttttgaatggtttcatccgctcttccttgaggatgaatccagttcattccataagcggcaatttccagtttctaagacattgccagagctctatgagttagtgaacaactatcagcctgaggttctgtggtcggatggtgacggaggagcaccggatcaatactggaacagcacaggcttcttggcctggttatataatgaaagcccagttcggggcacagtagtcaccaatgatcgttggggagctggtagcatctgtaagcatggtggcttctatacctgcagtgatcgttataacccaggacatcttttgccacataaatgggaaaactgcatgacaatagacaaactgtcctggggctataggagggaagctggaatctctgactatcttacaattgaagaattggtgaagcaacttgtagagacagtttcatgtggaggaaatcttttgatgaatattgggcccacactagatggcaccatttctgtagtttttgaggagcgactgaggcaaatggggtcctggctaaaagtcaatggagaagctatttatgaaacccatacctggcgatcccagaatgacactgtcaccccagatgtgtggtacacatccaagcctaaagaaaaattagtctatgccatttttcttaaatggcccacatcaggacagctgttccttggccatcccaaagctattctgggggcaacagaggtgaaactactgggccatggacagccacttaactggatttctttggagcaaaatggcattatggtagaactgccacagctaaccattcatcagatgccgtgtaaatggggctgggctctagccctgactaatgtgatctaaagtgcagcagagtggctgatgctgcaagttatgtctaaggctaggaactatcaggtgtctataattgtagcacatggagaaagcaaatgtaaaactggataagaaaattattttggcagttcagccctttccctttttcccactaaattttttcttaaattacccatgtaaccattttaactctccagtgcactttgccattaaagtctcttcacattg

SEQ ID NO: 211 - DNA, 1096 bp, Homo sapiens
gcgaaatggcgcctccggcccccggcccggcctccggcggctccggggaggtagacgagctgttcgacgtaaagaacgccttctacatcggcagctaccagcagtgcataaacgaggcgcagcgggtgaagctgtcaagcccagagagagacgtggagagggacgtcttcctgtatagagcgtacctggcgcagaggaagttcggtgtggtcctggatgagatcaagccctcctcggcccctgagctccaggccgtgcgcatgtttgctgactacctcgcccacgagagtcggagggacagcatcgtggccgagctggaccgagagatgagcaggagcgtggacgtgaccaacaccaccttcctgctcatggccgcctccatctatctccacgaccagaacccggatgccgccctgcgtgcgctgcaccagggggacagcctggagtgcacagccatgacagtgcagatcctgctgaagctggaccgcctggacctcgcccggaaggagctgaagagaatgcaggacctggacgaggatgccaccctcacccagctcgccactgcctgggtcagcctggccacgggtggtgagaagctgcaggatgcctactacatcttccaggagatggctgacaagtgctcgcccaccctgctgctgctcaatgggcaggcggcctgccacatggcccatggccgctgggaggccgctgagggcctgctgcaggaggcgctagacaaggatagtggctacccggagacgctggtcaacctcatcgtcctgtcccagcacctgggcaagccccctgaggtgacaaaccgatacctgtcccagctgaaggatgcccacaggtcccatcccttcatcaaggagtaccaggccaaggagaacgactttgacaggctggtgctacagtacgctcccagcgcctgaggctggcccagagctgtcaggaccatgaagccaggacagaggccaggagccagccctgcagccctccccacccggcatccacctgcatcccctctgggggcaggagcccacccccagcacccccatctgttaataaatatctcaactccagggtgttccacctg

SEQ ID NO: 212 - DNA, 880 bp, Homo sapiens
gcccccgtgaagatggtgtcctggatgatctccagagccgtggtgctggtgtttggaatgctttatcctgcatattattcatacaaagctgtgaaaacaaaaaacgtgaaggaatatgttcgatggatgatgtactggattgtttttgctctctatactgtgattgaaacagtagccgatcaaacagttgcttggtttcccctgtactatgagctgaagattgcttttgtcatatggctgctttctccctataccaaaggagcaagtttaatatatagaaaattccttcatccacttctttcttcaaaggaaagggagattgatgattatattgtacaagcaaaggaacgaggctatgaaaccatggtaaactttggacggcaaggtttaaaccttgcagctactgctgctgttactgcagcagtaaagagccaaggagcaataactgaacgtttaagaagcttcagtatgcatgatttaacaactatccaaggtgatgagcctgtgggacaaagaccataccaacctctaccagaagcaaaaaagaaaagtaaaccagcccccagtgaatcagcaggttatggaattccactgaaagacggagatgagaaaacagatgaagaagcagaggggccatattcagataatgagatgttaacacacaaagggcttcgaagatcgcaaagcatgaaatctgtgaaaaccaccaaaggccgcaaagaggtgcggtacgggtcactaaaatacaaagtgaagaaacgaccacaagtgtatttttagtcatctacacgtcaaatatcccaagacagattatgctaaatacatcgacttcatcttctaacatgatatattcaggatttacacattaaaatgattattt

SEQ ID NO: 213 - DNA, 2109 bp, Homo sapiens
gcggcggcggcagcgacagcagcagcagcagccagtattcgggaaaggcagacagtggctttgaagcgtatgttgaatttcaatgtgcctcatattaaaaacagcacaggagaaccagtatggaaggtactcatttatgacagatttggccaagatataatctctcctctgctatctgtgaaggagctaagagacatgggaatcactctgcatctgcttttacactctgatcgagatcctattccagatgttcctgcagtatactttgtaatgccaactgaagaaaatattgacagaatgtgccaggatcttcgaaatcaactatatgaatcatattatttaaattttatttctgctatttcaagaagtaaactggaagatattgcaaatgcagcgttagcagctagtgcagtaacacaagtagccaaggtttttgaccaatatctcaattttattactttggaagatgatatgtttgtattatgtaatcaaaataaggagcttgtttcatatcgtgccattaacaggccagatatcacagacacggaaatggaaactgttatggacactatagttgacagcctcttctgcttttttgttactctgggtgctgttcctataatcagatgttcaagaggaacagcagcagaaatggtagcagtgaaactagacaagaaacttcgagaaaatctaagagatgcaagaaacagtctttttacaggtgatacacttggagctggccaattcagcttccagaggcccttattagtccttgttgacagaaacatagatttggcaactcctttacatcatacttggacatatcaagcattggtgcacgatgtactggatttccatttaaacagggttaatttggaagaatcttcaggagtggaaaactctccagctggtgctagaccaaagagaaaaaacaagaagtcttatgatttaactccggttgataaattttggcaaaaacataaaggaagtccattcccagaagttgcagaatcagttcagcaagaactagaatcttacagagcacaggaagatgaggtcaaacgacttaaaagcattatgggactagaaggggaagatgaaggagccataagtatgctttctgacaataccgctaagctaacatcagctgttagttctttgccagaactccttgagaaaaaaagacttattgatctccatacaaatgttgccactgctgttttagaacatataaaggcaagaaaattggatgtatattttgaatatgaagaaaaaataatgagcaaaactactctggataaatctcttctagatataatatcagaccctgatgcaggaactccagaagataaaatgaggttgtttcttatctattatataagcacacagcaagcaccttctgaggctgatttggagcaatataaaaaagctttaactgatgcaggatgcaaccttaatcctttacaatatatcaaacagtggaaggcttttaccaagatggcctcagctccggccagctatggcagcactaccactaaaccaatgggtcttttatcacgagtcatgaatacaggatcacagtttgtgatggaaggagtgaagaacctggttttgaaacagcaaaatctacctgttactcgtattttggacaatcttatggagatgaagtcaaaccccgaaactgatgactatagatattttgatcccaaaatgctgcggggcaatgacagctcagttcccagaaataaaaatccattccaagaggccattgtttttgtggtgggaggaggcaactacattgaatatcagaatcttgttgactacataaaggggaaacaaggcaaacacattttatatggctgcagtgagctttttaatgctacacagttcataaaacagttgtcacaacttggacaaaagtaacacagaagaaccttactatgataatctacttggaatgtggataaatgtaaaaagaagaaaagttagaagagcaatatgtttccttctctgtaacagtgtcctaacagtgaaaatcagagttatttgttaatttttaaggaaattatatacttaatatgtattgattaaaagaaacatttccgaaat

SEQ ID NO: 214 - DNA, 1504 bp, Homo sapiens
ctcatccactcctgctgccactcagctgtgaagtcgatcaagaagcagcacctggtggaggtgaggtccatggccaaccctcctgctgctgtgaagctggcgctggagtccatctgcctgctgctgggggaaagcaccacagactggaagcagatccgctccatcatcatgcgggagaacttcatccccaccatcgtcaacttctctgcagaggagatcagtgacgccataagggagaagatgaagaaaaattacatgtccaatccaagttacaattatgaaattgtgaatcgggcttccctggcttgcggccctatggtgaaatgggcaattgcacagcttaactatgcagacatgttaaagagagtggagcccctacgcaatgagctgcagaagctggaagatgacgccaaggacaaccagcagaaggccaacgaggtggagcagatgatccgagacctggaagccagcatcgcccgctacaaggaggaatacgccgtcctgatctcagaggcccaggccatcaaggcagacctggcagctgtcgaggcaaaagtaaaccggagcactgctcttctgaagagcttgtctgctgaacgtgaacgatgggaaaaaacaagtgaaactttcaaaaaccagatgtccaccattgctggggactgtctcttgtcagctgcgttcattgcctacgcgggttactttgaccagcagatgcgtcagaacttgttcactacctggtcccatcacctacagcaagccaacatccagttccgtacagatattgccaggacggaatacctttccaatgctgatgagcgtcttcgctggcaggccagctccttgcctgctgatgacctttgcacagaaaatgccatcatgctgaaacgattcaataggtatccgctgatcattgacccctctggacaggccacagaattcattatgaatgaatataaggatcgtaagatcacacggaccagcttcctggatgacgccttcagaaagaacttagagagtgcactgagattcggtaacccccttctggtccaggttggtgttggcctttgaattcttgaaacactgcattcaagagtgaattcctttttgggggctgcctttagttttcaactttgtaagacttcattttgtatcagaaggataaagctttgcggtggttctgtaatagataaattcaacagaatcattatttgcatttaaaattctattcagtggtcgggcgaggtggctcacacctgtaatctcagcactttgggaggccgaggcgggtggatcatctaaggtcaggaattcaagaaaagcctggctaaaccccatctctacaaaaaatacaaaaattagctggttgaggtggctggcacctgtagtcccagctactcgggaggctgaggcaggagaatcacttgaacccgggaggcggaggttgcagtgagccgagatcatgccactgcactccagcctgggagacagaaagagactgtatctt

SEQ ID NO: 215 - DNA, 623 bp, Homo sapiens
ctggagtggaatcgcgactatgggagctccggggggaaagatcaaccggccccgaacggagctgaagaagaagctgttcaaacgccggcgggtgttgaatcgggagcggcgtctgaggcaccgggtggtcggggctgtgatagaccaagggctgatcacgcggcaccacctcaagaagcgggcgtccagtgcacgtgccaacattacactgtcagggaagaagcgcagaaaactcctccagcagatccggcttgcccagaaagagaagacagccatggaagtggaagccccttcaaagccagccaggactagtgaaccacagctcaaaaggcaaaagaagacaaaagccccccaggatgtagaaatgaaggaccttgaagatgagagctaaacctcttccactagaagattctcaactggagccagccttcagactcagtggttgtttcagaggactttgacaaaagcaaggccccttttcactctccagatttcctcctacctaatggcctactgacctcccctagagggatgtctttgggagggaagaaggtacagaagaaagattggagaagggtctctctagcagtcaactccatttgtaataaagccctagcactctg

SEQ ID NO: 216 - DNA, 676 bp, Homo sapiens
ggccagtaatgagtgactttgccaatggactaggctggcggattgcaggaggaatcttggtccttatcatctgttccatcaatatctactttgtagtggtttatgtccgggacctagggcatgtggcattatatgtggtggctgctgtggtcagcgtggcttatctgggctttgtgttctacttgggttggcaatgtttgattgcactgggcatgtccttcctggactgtgggcatacgtgccatctgggattgacagctcagcctgaactctatcttctgaacaccatggacgctgactcacttgtgtctagatgactgacagcctgagagactctataagaacatgtttttctaagccctttttgtgccaggtgtcccgttaacgtctctgttagttcagagagacgggatttcaccatgttgcccaggctggtgttgaactcatgagctcaagtaatctgctggccttggcctcccaaagtgctgagattataggcgtgagcactgcatccagctcactcctcatttctttctagccccaaaggtgttgagtcagcaaatcctgcagcctttgtgtgactttgagcatcactttcccctttcagcattaaatatatgacctctctgccttattttagaacttactacatttcaataaaactttttaaaaaatc

SEQ ID NO: 217 - DNA, 1963 bp, Homo sapiens
ggcacgcggcggcgacggtgacccaggaaggggctctggtgccgggctgagcgggggaagcaggggtagcggagccatgggggacgctcccagccctgaagagaaactgcaccttatcacccggaacctgcaggaggttctgggggaagagaagctgaaggagatactgaaggagcgggaacttaaaatttactggggaacggcaaccacgggcaaaccacatgtggcttactttgtgcccatgtcaaagattgcagacttcttaaaggcagggtgtgaggtaacaattctgtttgcggacctccacgcatacctggataacatgaaagccccatgggaacttctagaactccgagtcagttactatgagaatgtgatcaaagcaatgctggagagcattggtgtgcccttggagaagctcaagttcatcaaaggcactgattaccagctcagcaaagagtacacactagatgtgtacagactctcctccgtggtcacacagcacgattccaagaaggctggagctgaggtggtaaagcaggtggagcaccctttgctgagtggcctcttataccccggactgcaggctttggatgaagagtatttaaaagtagatgcccaatttggaggcattgatcagagaaagattttcacctttgcagagaagtacctccctgcacttggctattcaaaacgggtccatctgatgaatcctatggttccaggattaacaggcagcaaaatgagctcttcagaagaggagtccaagattgatctccttgatcggaaggaggatgtgaagaaaaaactgaagaaggccttctgtgagccaggaaatgtggagaacaatggggttctgtccttcatcaagcatgtcctttttccccttaagtccgagtttgtgatcctacgagatgagaaatggggtggaaacaaaacctacacagcttacgtggacctggaaaaggactttgctgctgaggttgtacatcctggagacctgaagaattctgttgaagtcgcactgaacaagttgctggatccaatccgggaaaagtttaatacccctgccctgaaaaaactggccagcgctgcctacccagatccctcaaagcagaagccaatggccaaaggccctgccaagaattcagaaccagaggaggtcatcccatcccggctggatatccgtgtggggaaaatcatcactgtggagaagcacccagatgcagacagcctgtatgtagagaagattgacgtgggggaagctgaaccacggactgtggtgagcggcctggtacagttcgtgcccaaggaggaactgcaggacaggctggtagtggtgctgtgcaacctgaaaccccagaagatgagaggagtcgagtcccaaggcatgcttctgtgtgcttctatagaagggataaaccgccaggttgaacctctggaccctccggcaggctctgctcctggtgagcacgtgtttgtgaagggctatgaaaagggccaaccagatgaggagctcaagcccaagaagaaagtcttcgagaagttgcaggctgacttcaaaatttctgaggagtgcatcgcacagtggaagcaaaccaacttcatgaccaagctgggctccatttcctgtaaatcgctgaaaggggggaacattagctagccagcccagcatcttccccccttcttccaccactgagtcatctgctgtctcttcagtctgctccatccatcacccatttacccatctctcaggacacggaagcagcgggtttggactctttattcggtgcagaactcggcaaggggcagcttaccctccccagaacccaggatcatcctgtctggctgcagtgagagaccaacccctaacaagggctgggccacagcagggagtccagccctaccttcttcccttggcagctggagaaatctggtttcaatataactcatttaaaaattt

SEQ ID NO: 218 - DNA, 966 bp, Homo sapiens
ggcacgatcatggctcactgcaaccagaacctcctgggctcaagtgatcctcccactttagcctcctgagtagctgggaccacaggcgtgtgccaccattcccagctaaattttttttttggtagtgacagggtctcactaagttgcctaggctggtgttgtactcctgggctcaagcgatcctcctgtgttggcttcccaaagtgttcggattacaagcatgaaccaccaggcctggcctgcacctttgttgaaatccagttcacatggctttatttctggacttttgaccatccctcccccgacccacccattgatctgtgtgtctttccttttgccaactgcactgtcttgattgccataggcttcccggtaggtcttaaaattaggtgatgtgagtagtccaattttgttctttttcaagcttgttttggcttttttaggtcctttgcttttctataaaaatctaaaattggcttgtttctacagtctgctaggattttgattggaattgctttttttattttttagatgggatcttgctctgttgcccaagctgaagtgctgtggcatgatcttggttcactgcaacctccacctcccaggttcacacaattttcctgcctcagcctcccaagtagctgggactacaggcacacaccaccatgccccactaatttttgtatttttagtagagacagggttttaccatgttggccaggctggtctcgaactcctgaccccaaggtgggcgggctgcttgagcccaggagttcaagaccagcctgggcaatatagtgagacctcgtctactaaaaataaaaattaaaacaaccagccaggcatggtggtgtgttcttataggctgaggtggaaggatcactggagccctggagattaagggtgcagtgagccatgcttatgctactgcaccacagcctggggaacagagcaagatcctgtctc

SEQ ID NO: 219 - DNA, 2206 bp, Homo sapiens
ctttgaagctgcatctgccagttacaccccaaatggctttaatcccctctcgggtctggttgccttttgcagtttgggttgtggactcagctcctgtgaggggtctggttaggagagagccatttttaaggacagggagttttatagcccttttctactttcctcccctcctcccagtccttatcaatcttttttcctttttcctgaccccctccttctggaggcagttgggagctatccttgtttatgcctcactattggcagaaaagaccccattttaaacccagagaacactggagggggatgctctagttggttctgtgtccattttcctctgtgccaaagacagacagacagaggctgagagaggctgttcctgaatcaaagcaatagccagctttcgacacatacctggctgtctgaggaggaaggcctcctgtgaaactgggagctaagggcgaggcccttcccttcagaggctcctgggggattagggtgtggtgtttgccaagccaaggggtagggagccgagaaattggtctgtcggctcctggttgcactttggggaaggagaggaagtttggggctccaggtagctccctgttgtgggactgctctgtcccctgcccctactgcagagatagcactgccgagttcccttcaggcctggcagacgggcagtgaggaggggcctcagttagctctcaagggtgccttcccctcctcccaacccagacataccctctgccaaactgggaaccagcagtgctagtaactacctcacagagccccagagggcctgcttgagccttcttgctccacaggagaagctggtgcctctaggcaaccccttcctcccacctctcatcaggggtgggggttctcctttctttcccctgaagtgtttatggggagatcctagtggctttgccattcaaaccactcgactgtttgcctgtttcttgaaaaccagtagaagggaaacagcacagcctgtcacagtaattgcaggaagattgaagaaaaatcctcatcaatgccaggggacataaaagccatttcccttccaaatactcgacaatttagatgcagaacatttctctgtattcagacttagagtaacaccagctgaaaactgcagtttctttcctttggatacataaggcttctctatcggggtacgggacagggaggaggcctcatgtctgaagggggatttaggggcgagagccccagccctgaccctcggtcctgtgcaccgctttggggcacagtctgatggcgcctttgctggcgccttagtatggttgactccggatggacaaaagaaaaaaaattttttttcttgaatgaaatagcaggaagctcctcgggagcatgtgttttgattaaccgcaggtgatggatgctacgagtataaatggattaactacctcaatccttacagtaagattggaactaagggcagggactcatgcataagggtatgaatcccagccaggacaagtgagttgaggcttgtgccacaaaaggtttgtccttggggaacaggcaggcctgccaggatcccccccatatcgattgggctgggagggctggccgtgaggtccccactttctgctttccttgcccatgtgtcacccctttggcctccagcttgtccctctctcactttctatagctttgttggaccagatggtgaggaaaggaatggcctcttcccttctagagggggctggctggagtgagacctggggcttggcctggaacccaccacacagccccaaagtcaggaagcctggggaaaccagagctgagacctcttcaacagggtttctttgagatcctacacctccattgggccctttttcagtcttcaatgggggcccagttggctctagaaggagaagaggtgaagcaggatcctttgccctgggggagtctgagggcgcggtccttggactcattcaggccgtcttggtaggtgggggagtcccactgggcgatcccagcccccccccacccaccctctaatggacctcctcatagaagccccatttcacttttgttttatctacctcttagcaaaacaatagataaattaggtagtggcagctccacttgcttaggttagggggggaaaaagatttctttttccaaaggaaaaaaatattaccttgagaatactttccaaaaaataaaattt

SEQ ID NO: 220 - DNA, 1373 bp, Homo sapiens
cttcaactacattcttaatgccgatggtcctgctccccttgaactacccaaccagtggctctgggatattatcgatgagttcatctaccagtttcagtcattcagtcagtaccgctgtaagactgccaagaagtcagaggaggagattgactttcttcgttccaatcccaaaatctggaatgttcatagtgtcctcaatgtccttcattccctggtagacaaatccaacatcaaccgacagttggaggtatacacaagcggaggtgaccctgagagtgtggctggggagtatgggcggcactccctctacaaaatgcttggttacttcagcctggtcgggcttctccgcctgcactccctgttaggagattactaccaggccatcaaggtgctggagaacatcgaactgaacaagaagagtatgtattcccgtgtgccagagtgccaggtcaccacatactattatgttgggtttgcatatttgatgatgcgtcgttaccaggatgccatccgggtcttcgccaacatcctcctctacatccagaggaccaagagcatgttccagaggaccacgtacaagtatgagatgattaacaagcagaatgagcagatgcatgcgctgctggccattgccctcacgatgtaccccatgcgtatcgatgagagcattcacctccagctgcgggagaaatatggggacaagatgttgcgcatgcagaaaggtgacccacaagtctatgaagaacttttcagttactcctgccccaagttcctgtcgcctgtagtgcccaactatgataatgtgcaccccaactaccacaaagagcccttcctgcagcagctgaaggtgttttctgatgaagtacagcagcaggcccagctttcaaccatccgcagcttcctgaagctctacaccaccatgcctgtggccaagctggctggcttcctggacctcacagagcaggagttccggatccagcttcttgtcttcaaacacaagatgaagaacctcgtgtggaccagcggtatctcagccctggatggtgaatttcagtcagcctcagaggttgacttctacattgataaggacatgatccacatcgcggacaccaaggtcgccaggcgttatggggatttcttcatccgtcagatccacaaatttgaggagcttaatcgaaccctgaagaagatgggacagagaccttgatgatattcacacacattcaggaacctgttttgatgtattataggcaggaagtgtttttgctaccgtgaaacctttacctagatcagccatcagcctgtcaactcagttaacaagttaaggaccgaagtgtttcaagtggatctcagtaaaggatctttggagccag

SEQ ID NO: 221 - DNA, 982 bp, Homo sapiens
aaaggtagtcagttgtggcttctctttctcatttttagattttctcttcagattctctcccttcttcctgcctttgcagtgatgtgggtaaaccgggactatttctgctgaaaagtcttctagttcttcgcccctctaatactttagtttggtatttatttttattattattaaaatttgatcgcttcacataaagacttactaaaactttgtgacttttgcctctgcaggaatgccacagaatgtcaattgtattatttattatagcacctcagggatgtttattttctgtctatggtggccccagaacttgtacatgttactgggtattaaatgcgtccatagtaggggtattaaatcagcaaggtccccatcccagaaaaaatgtgcagtttgtccaatgggaaagatgcagagacagtttcagttaatatactaagtgctaagattgggatgtgcacaagaagctagaggtaaaaattctggaaaactgaacgtgaagtcaccactaggcaagctgcctgtaattgagcttgcttgtatatgaccaatcaacctttgcttgttgaagggttagttatctagtttccttcttttcttttttggaatttggtcttttaaggtcttgataatctttctagtctagagcatgtgaacagaacagaaggaaaatcaggactcagtttacttaatttaagcaagcattggttgctgcagttcaggggaggttaaagttgctgggctccactctcttattagcatggatgcttaagaacttcagggtttggaggtcagctgaacagctgtttttgtactctccctggttttagtagctgagttctataaaagaataccactcgggtaaatgctaatatactttagccattttttacctgataacattgcataaaaagattatcatggctttcattgcttcttggccttttggctaaaatcaagtgtaaaaagattgccatggctc

SEQ ID NO: 222 - DNA, 1963 bp, Homo sapiens
  misc_feature 1963: n = a,c,t, or g
ccgaactcctgacctcaggtgatccgcccacctcggcctcccaaagtgctggggttacaggcttaagccaccaagcccggccgaccttcttctatttttccattctcctttccaaagccatggccatgcgctcctgtgtacaggtgcataaacacatcagtgtgccatccctcacatgcatgtcgttccccacccctccttcccagggcttctcttggctccagcgttcctctgggaccctctgcagatacagcctgtgctggacccccagccagggtgagggctcattctgctctgtcttccccactgcctcagtttcccccaaaagctgctttcacgtccttctagtagggggcctcccatgggggcaaggatcccctttaggattcaatctttcctctttgggcagttttggctttgagtcccccagggatcagggtgagaatgaagaagagctcagtgagcggaatgacagcagctgggtgggtggtgtggggagaggctgaggggaaggcagcccccccaggggggcctaaccgtggaatcactgcaatttcctctgagatcccgacttggacaaccaggacagggattgaccattcccttcccattccactcggactgtgtccaagcgggggctgtccactgcgggggctgcctccccatcgggtcctaacagctctaagactgggagtggagttcctggaggtgtggggaggggggcgtgttttcaatttagaaaaatctcagccagctcgagccgagagagaatgcgaaagaggaagttcggaaggagcgaggaatggggtgggtggcagcgggggcggctcagtcgctgtcgctcttgtccaccagcacggcgtccgactcctcggtgatctccagcagcgcgtgcacgtcggggctgctcccgcgccgcaggtcgccggcctccccgcgctccgcgccgccctcgtcgtcgtcggcgcccacctccaccatctcggtggccttgagcacttccacctggccctcgcggatcttcttgacgtggaaggtgaagggtggcaccttgtagaccgcggtcttggagcgcgcgtacaccacgtggtcgggcgtgaaggatttgcgcaacttgtcccgcgacgtcttcagtttctcgcgccgctcggcgggcaccaggcgcgtgcccagcttgttcatgcgcttctccagggtgtgccgcgtcttctccaggttttccttggtcttgaggcgcgtcttctccaggttctcgcgggtacgcaccttggtcttctccatcttctccttggagaaggccttcttgaagtcgtccacgcgccgcaggccgctgcgcttgatacgctctgcgcgggactcctcaataacctcctcaacctccaccgcctcgtccgacgaaagctccagcgccgctgcgtcctcctcgggccgctcgccctcgcccagctcctcgccctccttctctggcagcgcctccgactctttcagcgatttgctgatgctcagtttggccggcagcttcacttcatcctggtagatcatgactttaaagttgcggcgccgcagcagctcggcctcgttgacctccagcttcttgatctgccccgcctggcgctccaggctgccgcgcacggtcttcacgttgacgctgaccttgcgcaccttctccagcagcttgctcaccgtattgctcgtggtggcgtgcgccttgcccagcttgctcagctcgccctggatgctctgcactgcgccctccatctccgcctgccgctcctccagctgtgcttgagtcagctggatctggtctacggccccgatgattttgtccaggaggctcagcaccagcacgccgttcacctggtccgacttgatcagctcttctgagccggcccccgacggctcctccgctgcctgagccccagcggaggaaggctccggggcctcggcgtcgggtacccgggan

SEQ ID NO: 223 - DNA, 1627 bp, Homo sapiens
agcagctttagataaagtaagcagttctgctttcattttataatttatttctacttttgtttcattaatcttttcctccggcatgccttggattttgttgtgttactctttttctagaggctcgcattgtgtgtctggttcacttatgatcacgcttgcctacttttaagaatggaagaggggaggtggagggtggctgcacagtcgagggtgtgaggcagtcttgctctagccccaccatgccctcagcccgctgtggccacgctggttcctcaattgctggggcgtgcagtgtctgtaagggaggctactgatgccatccgaggaagatgtaaggtttcgtgtgggcagcgagagcctagcaggcatgtggggtgcccagcaaagggtaacagtggacagttgttgcctcattccacagagttttgattttttttttttttttttttttaatggtcactccatcaacatcccccatggccagagcctgagctggtccccagagacacaggcattcagctgacagcctcgccttcacgctgctgctgttctcatgggggacaggcctcaggtggcaatgcacaaatcattagttaagggcagttgtgacagttaccaaggagtgtagtcccccgccccccgcccagtgaaaacagccctaaccaggggtggggacctttgggctctgacccgaagggtaggagaagctggaaggacagcattcctgtctgcgaaggcaggagcaaagctgccaggctatgaaggaaatggctggagcctgaagtcatgcaagctggggctggcagggacagggccaacttccaggcctgggggccaccatgaggattcaggacgtgacccccagggcacatgaaggccttccatctgtatttaagaaaagactttatcagacgagtatggtggctcgcgcctgaatcttagcactttgggaggctgaggcaggtggatcacgaggtcaggagttcaataccagcctggccaatatggtgaaaccccatctctactaaaactacaaaaattagccaggcatggtggcgcacgcctgtagtcccagctactcgggaggctgaggcagaagaatcacttgaacccgggaggtggaggttacagtgagccaagatcgcgccactacactccagcctgggtgacagagtgagactccgtctcaaaaaaaccaaaagactttatcttatttcctatatgtttgtggtttcagtcctgatgtataatttgaccctagttagaatggttatctgaggaagtggcctgtacgatttctgcttttttaaatgtgtggctccctttcttcattgattaacgtatgattatttttataaatgttccatggcagtgggaagggattctctgtcacattccacatctggatcagttcctccccattttgttggtcaaatccgatctgccatatcctgtgtaatgacaagtgagttgcattctcaccgtcactcctggggtctctccgcttcccctgagctggctcagcagtctgctccatgtgttttgatgcagggtgacccattggtattccccacccccagcacccccatctgttaataaatatctcaactccagggtgttccacctg

SEQ ID NO: 224 - DNA, 1868 bp, Homo sapiens
  misc_feature 659: n = a,c,t, or g
cgcgaaaatggcggcggcggcgacggccgggcgctcctgaagcagcagttatggagcttccctcagggccggggccggagcggctctttgactcgcaccggcttccgggtgactgcttcctactgctcgtgctgctgctctacgcgccagtcgggttctgcctcctcgtcctgcgcctctttctcgggatccacgtcttcctggtcagctgcgcgctgccagacagcgtccttcgcaggttccgacgcgggcgttcggggagtgtcagagctgggtctggcccgaggccacacagtcaccacctcctgtgtccccagattcgtagtgcggaccatgtgtgcggtgctagggctcgtggcccggcaggaggactccggactccgggatcacagtgtcagggtcctcatttccaaccatgtgacacctttcgaccacaacatagtcaatttgcttaccacctgtagcaccgtgagtgagagcgaggccgagagcgccacggggcggttccctggggcccagctgaaggcccccctgtccccactcgcgttccgcatggaggatactgagccttacccctaaccccgatcctctacccaacatgtcagtttttttttttcattttcctcaatatttttcttcttgctttctcttctcctggntcccagcctctactcaatagtccccccagctttgtgtgctggtctcggggcttcatggagatgaatgggcggggggagttggtggagtcactcaagagattctgtgcttccacgaggcttccccccactcctctgctgctattccctgaggaagaggccaccaatggccgggaggggctcctgcgcttcagttcctggccattttctatccaagatgtggtacaacctcttaccctgcaagttcagagacccctggtctctgtgacggtgtcagatgcctcctgggtctcagaactgctgtggtcacttttcgtccctttcacggtgtatcaagtaaggtggcttcgtcctgttcatcgccaactaggggaagcgaatgaggagtttgcactccgtgtacaacaggtggtcgggtgcacagacagggtggaggcgggttccctgcttaggaggagagggaggaaagcttgagatcttgacacttccagtcttccaattctccctagctggtggccaaggaattgggccagacagggacacggctcactccagctgacaaagcagagcacatgaagcgacaaagacaccccagattgcgcccccagtcagcccagtcttctttccctccctcccctggtccttctcctgatgtgcaactggcaactctggctcagagagtcaaggaagttttgccccatgtgccattgggtgtcatccagagagacctggccaagactggctgtgtagacttgactatcactaatctgcttgagggggccgtagctttcatgcctgaagacatcaccaagggaactcagtccctacccacagcctctgcctccaaggcattcgatgcgtgtttaatgatgatgactccgcaagccctctgacattgtgatcacctcagtttcccagctctggcccggtgacccctcagccaacagccctaacatttgccaagtcttcctgggcccggcaggagagcctgcaggagcgcaagcaagcactatatgaatacgcaagaaggagattcacagagagacgagcccaggaggctgactgagctcaaaggaacaggatggcacccagagccgcaggacggagactgggggcagccctcacccaactcacaacaggctggatgggtgggtggtaaaaagggaaggatgaggctcccccaatgtcacattaaattcatggttttcattc

SEQ ID NO: 225 - DNA, 2980 bp, Homo sapiens
ggagacctgttcagtggaatgaattcagttagctccattcagaaccaaatgcagtccaagggaggttatggaggtggaatgcctgccaatgtccagatgcagctcgtggatacgaaggcgggatagccctggtcctttctccaggttattgtgaatttctatattttctctgtccactattctgtaatttttttttgtcctgtgattgcttttattttgaattacaaaaaagaagtgtgatggcaccttgtccaccctgtcgtgattattccagtgagatgttactgttctgctctgaagaagatactgtcagacgaatcctgcatttccttcagctggcatgcatgcctttggactcatggacagagttctttggattgtcactgaattttcaatgtttaatcagtatggatctgatcttcgcatgatcttttttgtgaatgctaacaccattttgcagttttttttttctattttaaacatttttcttttcactgccgaccccctgccttacgattttattggaaagcaaggacctgctattatttgttaatttgccatcatttatgtatattttggaaggtatgagacccacaagcacaatgatcatttttatttgtttgtttgtttgaaacttcagcagaatagatatctgcatgctttatgaagttgttgcttcggtaagagcccatgggatgccagaaattaacatttctttgctgccatgggctgatgatgctgctattagataaagtttagctgtggcaccaagtcacatcattttcatagaaaaagattacttgtagcttattttagaagtatgaccttttggtctgtttgattgattgattagaattgcaataaaagaaaagcttgcattcataaggcattcattctgttgtaaatgttcaatatatttattttgagagcaaggacctgtggttgtaaacaggtgtggttacaggtgtggttatgtatctgagtgttgcggtcatactctcctccagtccaatcctgagcatcttcatcttattaattagctgttcgtttctttgtgcactcattcttttatttttacttctttttaatgttatggtatccagttgtttccagtagcagtttcttgaacttctggcctgtactactaactgcagacctccagagtcactggcctttctgtgctctacatattattttaggggccacatcagttgccaagagcaacatacataccgacctggctgaattattgccagtgaaaacaacctgtacgaagcctttgctcaggttctaaaatatgtttgtccttgcacgaattttgtatatttcaaatatttctgtaaaggtttcttcttttctgttagagtgtggtgttaagccagagtcagtggtttgtgttctcattaaaatgtttgtttaaatcctatgtccaattcaagcctatctaactacatttggtaggattaacatttcatataacaaatggggcttaattaaaaactttaacttggaataaaggaacagggatcactttatcttctgccttcatttaccttagtccaagattcttgcaaaacaggcaactgaacaaacattaggtttatgtaggtaaaatgtgaaagcatttctcctccactttttaaaatttaatttacccagtacagcggggcaccagattacttgatctttgtattttgcagttttgagcctttgtgtcaatcccaagcacagagaggatctgccaaggaaaaacatttgcatcttcggagtagacattttgcagtttgtttaataacaacttctaaagtaagttgaattcatccattgtcactgattcaccaagtggatgttgcattgtggaatttgcctgagtactgttgtcattctgctcagccaggcacggtcagtttcttggccagggacattgctatgtgctgtgtgcaagctctttagaagagagattggattttcttggcattatcagcactcatgctatttagtctacttctattttgactgactctttaaattagtacaatttttctacttgtcatataactcctggaacaatagtacgggaagccgtgatccttttccctgactcatgattttagtctttttccaaatcgctgttttttttttgttttttttttttttgctgctccaacgaccagcatgtgttggagcagatctccatggtaagccaaaagtggacttgtcagcctataactactctgcagctgccactaactctacaggcacagtaactacactttatacaggagcacatgccaaagtgcctgggaggtgccaataaaatcaagaaataagaaaactacaaaaaaagatacggtattaaccttggacataattttttttagggaggcagctttcccacttttataaagggggttgtaaatctcaagaggtcatttgttccccatagcagcatatctcatttttaaattgaagcgaattaaataggattttactactcaacattcattatactgttaatctttgctgaaatatatgctaacaaatgttaagcaagggaaactgaagacttagtcatgtggattgttagcagtgatctgcattctgtaaaagaggtactttcccatgatgtaggcatgaagtggtgccagtaagcgtagagcggaaatgttgactttagttaacattgggtttagcatttccagtgcagcattatcagtgggcctttaaaaatacttcgtaagtacattagctttcactttgttgttaaattatagcagactcattatagagaacaagtttgccttgattttgtttaaaatgacttctgctaagcacccagaagataaaattgacatatttttataatataagcatactttttttgtacattgtgttcattcttgaataaaatgagttctgtgttggcttgtagatactaaaaagaaagtattgattttgattcaataaatgttttctttcc

SEQ ID NO: 226 - DNA, 1013 bp, Homo sapiens
cctgcctctctcctgtcccctaacacacacagagcccgtgctctggaggcgtccggcccacccaccctctctgcccccaggacctgctcaccacctatcccttcaccaagatctccagctggagcagcggcagcacctacttccacatggcgctggggagcctgggccgtggcagccgcctgctgtgcgagacctccctggtgagctcaggttctttctcccatccaagatgcataggacagagctgctggagactgggttccccaccctcacccctttcaagtggctcactaagagggctcagtcacagggcccaggcggggccagcagatctggagagggcctgggtgcatccccaggaccagcagccaaggtggcaaggccaggcgggaccccctgcgcccttggcccattccaaggagggagggagacccagctccagcagggcaagcagaaatgacggccccaacggcaggagcccgccttccctttctccatgccctgcactgctggttgctgaggaagagaaggtggtccctgagtccaggacccccacctgccctctgcacccacagcctctgacccccactgtcccctgtccagggctataagatggatgacctgctgacctcatatgtgcagcagctcctgagtgccatgaacaagcggcggggctccaaggccccagccctggccagcacctagcagcggatgctggcgtgtctgctcaggcgcccttcccgacctctagcctggcggcaccttcccaggccctctcaacccagggcctgtccttggcgggcagccttccatgctgccccccatacaaagcccactcagccccgcaggcggccccctctgtcctgggcgctgcccagggaggccaaaagacgggcccagaatggggtcgggagtctcggacccccaggctattggtggatgactgactgacaggacacctcccaaccccaccccaccccaccagaatgttcaataaaaactcctggagcagg

SEQ ID NO: 227 - DNA, 2634 bp, Homo sapiens
gtgttatttatggctttgccaagctacatcaagaactcagctgtgctgtgcctaccaggggtctcctttcttacccaggactcctttcttctccttgaatatttatgtccattttaacacttcctggttgcaagagggatgtgcctccattatttcctccacagttttggtatttgtcagacatttgttctgctgtctttctaatccagccaacgtctgctcaggaagtggggccagctccactgggacccatagttttacttccttgtcatttgattggatagtttccaaggaagcccctccagattggcactatctcagaaaaggagagcttgttgtgaaacactgcttcctgaaacttcctgctattgcctaaagctacgtctgaaactgagtagggaaaggcatacttttccagggacttagggggataggctttggaaatgggacaggtctttcagactcacagcttgataccctaacaaagcagagtatatttatttgtttcccaggaaggccattgcagtttgactggctgagggatacagagatgaaattgtaaactgtatccagattatcaaagctaatttgactagtttgaacctcgtcagacattcattcctttggccattgccatggatgaaaccgagaatctgcagtctgatctgtggacttctctgctggcatatcttttatgatttaacctcttccatttgatgattctgtatttcagagtcagtttcttgagtaactccagtgctacaaaaagaattagtaatgtggtgtgggcagcgtgacattttatgtcccacccaaaaattggattccttttggagactgatctgttggtctcaggcatttcattaggaccagattggttctaagagttagtctggactggccctaggaaacttgaattaaataagcctcttccccttaccgatcctttttaacactctcaggtttgtttgtttcccacttttttcctatgctggtctgcctcaaagtctcaagaccaaggtgactcaagataacaccagaccacgcatgatcaccaaaaccttcccatcctgattctcttcttctacctctaccctctccaacttctcctggtcttcacatatactctcaaagctagtctgaaagtgaccttactttcggaagtagggaagtggaactttggtaaatgactgtttgcctcatttaatagtatacaggctcagcccatagactacagttcttcagaggccatatgtctcagcaagtactggttatattctttttttgtaaggaagatcataaatgctaaaaattccactaagccattcagttcttccttttgcctacctagtcctgatttttgtattaattggttccctttagcaagggattcagatctttgtaccttatcttatatccagagcagattccatttggcagatagatggtctctagcctattgtattcttagaccaaaaatcataacctgctgtttctcagcaaagccttgctctctggagcttactatgtgctggtacttaaagagtacattctgccttgctatagtgaagagacccactccaaataaaaaaggggccacacggggcttctaagttaggttgccagtgttgctgcccatgatgagttatttgcctctgagtttcagatgacctctctgtagggacactgtgttatcaaccattaagaagaaagaaccacaagcctcccaagtatttgggttctatcttagggttgaaatctggtcattattccctctacccttggaatcagagcaatgtgtcttctttcctccaacctcttaccttagatgcatcctggttatctggaagcatgggaaagaaggctacttatctctttgtatgtggctcccagtctgtgaggatacataacattttctctacaatgaatctgtgctaatatttgccttctttctttcttttcttttcacccttagagacagggtttcactatgttgcccaggctggtctcaaactcctgggctcaagcaatcctcctgcctcagcttcctgagtagctggaaccacaggtgtgtgctaccgtgcctggcacttttttgccttcttaatggagatattcagttttctttttttcatttaaacaaagaaaaaaaatgtatctactctaccttccctctgctctcctccctccctatcctacttgcccatatgagcacggctccccatggccacatactcctgcaaagcttttatgctgcttcgcttttctctaaacagatctgatattgctgctcctgtggttttctcaaaattaactttgccgtggtttttaaaaaggaatcaaaatgcattgttgcattaagctttttcaataaaggaaaattacggaaggaaaataggcaacaccagcaaattatatgtggacaggttctaaactctatatatacatatatatatatatctatatatctatatacgtaatcatctagttctgtcatcttactgaaaggaataacacttctaaagatcaccatttctgagaagttcttggaaatctttatgtctacgtgattgtattagatcagcaataatgactatgtaatctcaaaaaacaaataaaatattcttaacatgg

SEQ ID NO: 228 - DNA, 2643 bp, Homo sapiens
ggccagttttaacccagacacccctatccctcagcagggagggaaaggaggacctccccctgcttcttgatccccatgacagtgggtggtgcaggggatcttgtctgtttagagtgagtagatgatacatacatgcactctggttctgctcctagctggctgcatggcattgtacagtacacttaaactcttccgaaccccagattcctcatcagggataaccctttctctgcctatcttatagcactagtggggctcaaaggagagaatggatgtgaacgtgttttaaacttctaagtgctctgcacacgagggcctttctcatgaagaatgtcttcttctctccttcctatacctcatgcccatcacctgtcaaatctggaacgagcctattttacagtagaggtctgggggaagggtggtgtcagtatcttggggttctctctaggccctggtcagtgagctgtcagagcacttgagggaccccctgacctccctgagccacactgagctggaagccgcagaggtcatcctggagcatgcccaccgcggggagcagacaacctcccacgtgagggctgtggcctctaagagcttccccggggatcctttttacccttccctcccaatgcagccctctttgcttacacattgtcctttttcttccaaaaagtgctagggacagggttggagagtgagtcagtgaatgagtgactttgactcttcccaacccctaggtaagctgggagcaagacctgaagctgtttcttcaggagcctggtgtattttcccccaccccacctcagcagtttcagccagcagggactgatcaggtgtgtgtcctggagtggggagcagaaggcgtggctggcaagagtggcctggagaaagaggttcagcgcttgaccagccgagctgcccgtgactacaagatccagaaccatgggcatcgggtgaggtgggggggcacaggtgtcatgtgcaccttcttgtctcagcaagaagagctgagagaggggatcttggagccattgagggtgtcatggagctacagaggggagggaaaggtattttaaggtaacagtgtggcacaatagttaagagcacagtttttggagctagaccgacataggttcaaattctcttctgttgcttcctagttctgtagccccaggtaagggagtgacttaacctctctggacttcaatttcctcatcactaaagtagggccaataatagcacccacctcatagggaagattaaatgacataatgtatgtgatgcaactagcaaagtaccagtcccatagtaagtcatgcccccacagtatttccacccacccctgttctctgccttcccaaccaggtactgcaacgactggagcagaggcggcagcaggcttcagagcgggaggctccaagcatagaacagaggttacaggaagtgcgagagagcatccgccgggcacaggtgagccagggaagggggctgcccggctggccctgctgcagggggctggcttagatgtggagcgctggctgaagccagccatgacccaggcccaggatgaggtggagcaggagcggcggctcagtgaggctcggctgtcccagagggacctctctccaaccgctgaggatgctgagctttctgactttgaggaatgtgaggagacgggagagctctttgaggagcctgccccccaagccctggccacgagggccctcccctgccctgcacacgtggtatttcgctatcaggtatgaatgggggtggggacctctgatgggcaagggtgggggacagccaagtcctgaatccttcgtgtgtggcccaggcagggcgtgaggatgagctgacaatcacggagggtgagtggctggaggtcatagaggagggagatgctgacgaatgggtcaaggtgggtatgggaccccgggctctgaccttgggttgggggcagtaggagggacttctctgtggcctccatagacccttctaggcaaagctagaagcctgagtagaagagagccagggtcatggactgctgaggtaagtctaatatctgttcacattgctgggtgagcaggctcggaaccagcacggcgaggtaggctttgtccctgagcgatatctcaacttcccggacctctccctcccagagagcagccaagacagtgacaatccctgcgggggcagagcccacaggtaagaaagggaaattttgggttagaggaccctgggtatggagaaaaattgttaggggttgtagccctggggtgtcatggtcctggggcactgctacccacctccctctcaccgtctctcctgggcctctgtagcattcctggcacaggccctgtacagctacaccggacagagtgcagaggagctgagcttccctgagggggcactcatccgtctgctgccccgggcccaagatggagtagatgacggcttctggaggggagaatttgggggccgtgttggggtaatccccaccctgaaggaggaagagctgctaggccccccagggccacctgaactctctgaccctgaacaggtgaggcttaccttctccctgaactccccaggcacctctgggttgaccctcccaccccaataaagccacatatacatctt

SEQ ID NO: 229 - DNA, 2527 bp, Homo sapiens
ctgaaagaagctaaagaaaatgcatctcgtgatcgcaaacgctatcagcaagaagtagatcgcataaaggaagcagtcaggtcaaagaatatggccagaagagggcattctgcacagattgctaaacctattcgtcccgggcaacatccagcagcttctccaactcacccaagtgcaattcgtggaggaggtgcatttgttcagaacagccagccagtggcagtgcgaggtggaggaggcaaacaagtgtaatcgtttatacatacccacaggtgttaaaaagtaatcgaagtacgaagaggacatggtatcaagcagtcattcaatgactataacctctactcccttgggattgtagaattataacttttaaaaaaaatgtataaattatacctggcctgtacagctgtttcctacctactcttcttgtaaactctgctgcttcccaacacaactagagtgcaattttggcatcttaggagggaaaaaggacagtttacaactgtggccctatttattacacagtttgtctatcgtgtcttaaatttagtctttactgtgccaagctaactgtaccttataggactgtactttttgtattttttgtgtatgtttattttttaatctcagtttaaattacctagctgctactgcttcttgtttttcttttcctattaaaacgtcttcctttttttttcttaagagaaaatggaacatttaggttaaatgtctttaaattttaccacttaacaacactacatgcccataaaatatatccagtcagtactgtattttaaaatcccttgaaatgatgatatcagggttaaaattacttgtattgtttctgaagtttgctcctgaaaactactgtttgagcactgaaacgttacaaatgcctaataggcatttgagactgagcaaggctacttgttatctcatgaaatgcctgttgccgagttattttgaatagaaatattttaaagtatcaaaagcagatcttagtttaagggagtttggaaaaggaattatatttctctttttcctgattctgtactcaacaagtcttgatggaattaaaatactctgctttattctggtgagcctgctagctaatataagtattggacaggtaataatttgtcatctttaatattagtaaaatgaattaagatattataggattaaacataattttatacggttagtactttattggccgacctaaatttatagcgtgtggaaattgagaaaaatgaagaaacaggcagatatatgatgaattaaaaatatatataggtcaattttggtctgaaatccctgaggtgtttttaacctgctacactaatttgtacactaatttatttctttagtctagaaatagtaaattgtttgcaagtcactaataatcattagataaattattttcttggccatagccgataattttgtaatcagtactaagtgtatacgtatttttgccactttttcctcagatgattaaagtaagtcaacagcttattttaggaaactgtaaaagtaatagggaaagagatttcactatttgcttcatcagtggtaggggggcggtgactgcaactgtgttagcagaaattcacagagaatggggatttaaggttagcagagaaacttggaaagttctgtgttaggatcttgctggcagaattaactttttgcaaaagttttatacacagatatttgtattaaatttggagccatagtcagaagactcagatcataattggcttatttttctatttccgtaactattgtaatttccacttttgtaataattttgatttaaaatataaatttatttatttatttttttaatagtcaaaaatctttgctgttgtagtctgcaacctctaaaatgattgtgttgcttttaggattgatcagaagaaacactccaaaaattgagatgaaatgttggtgcagccagttataagtaatatagttaacaagcaaaaaaagtgctgccaccttttatgatgattttctaaatggagaaacatttggctgcatccacatagacctttatgttttgttttcagttgaaaacttgcctcctttggcaacattcgtaaatgaagcagaatttttttttctcttttttccaaatatgttagttttgttcttgtaagatgtatcatgggtattggtgctgtgtaatgaacaacgaattttaattagcatgtggttcagaatatacaatgttaggtttttaaaaagtatcttgatggttcttttctatttataatttcagactttcataaagtgtaccaagaatttcataaatttgttttcagtgaactgctttttgctatggtaggtcattaaacacagcacttactcttaaaaatgaaaatttctgatcatctaggatattgacacatttcaatttgcagtgtctttttgactggatatattaacgttcctctgaatggcattgatagatggttcagaagagaaactcaatgaaataaagagaatatttattcatggc

SEQ ID NO: 230 - DNA, 2197 bp, Homo sapiens
gaaagatcagagagaagtccagagccttgcctgcttgtgatcctggtggagaaggtggagtatggtgagctgcttgctaaggacagccaggcaacactgtgtttgtgaagatgtgctccaccttctcctctgtgcatcccagctcctcctgctgaaacagctgagcttgctttttggatttcttagactcctggcctctgagagacacctctaaggacaaactgaccttgcattgggaactttattatccagatcctcataggctttgtctactctggattgcttgttgcaacagttcttaggaagcaagattgtctcctgcaccagcatctgcctgtgtttgcttttacctactttgagcaagacccagtgaggccctagctctgttggtcctgaaaagcctgaaccctgaggctgtttctcctgcctccaaaatgcaattataggaaataagaagcacagaaacagtggaaacaaccaggaggagaaacaggaaaacctaaaattttcaatattcaaaaatacctgtcgtggtggttgatgcagaaaacactgagttcatcaaagagctttgtaattgttggaccagagaacccctttgctacaggaactgatatgttttgtctttctggcctagtcaagggaggataagtaagtatctggggcatggaaggaatgcactcttgggctgttttgcttgtatctgactcacccctgactctccagtgaagcagaaaggaagaaacctcacaccacccaggtgtggccagactttggccattattgtgaatccccaagagttaccacaggcccttcccaaatatatatttaatcttgtggttcaaataagcttttggctcacatctaagcacatcataaagaacgctgtagaagaggtgacatgatgaggcgggaagacgaggaagaggagggaacaatgatgaacgcaaaaggggacttagagatgaatgaggaggaagagattattgagacaggagaactggttggccttttgtgagtgctatgcccactccaatgccccacaacaagggcacccggttctctgaggcatgggaatatttccacctagctcctgctcgtgctgggcaccatcccaaccagtatgccacctgccgcctgtgtggcaggcaggtgagcccgtggccctggggtcaacgtgggcaccactgcactgtggaagcatctgaaaagcatgcacagagaggagctggagaagagtggccatggtcaggctgggcagcgccaggatccaaggccccacgggccccagctccccacaggcattgagggtaactggggtaggctcctggagcaggtgggcaccatggctttgtgggccagccaaagggaaaaggaggtgcttatgagggaaagggcagtggaatggcgggagagggctgtggaaaaaagggagcgagccctggaggaggtggaaagggccatcctggagatgaagtggaaggtgagggctgagaaagaggcatccaacgggagaaaaagctgcctgcagcagtacatcccttccattttgtttaaattgggcttggagaatctattctgaaaacattgactctagacttgtagaaaagagccattttagtttcaactcaaatgtaaagcaaagtagtttggtgacatttgcttttatgtgaaatagtgcacagatgagttaatctgagcaggtctgaattgaccaaatgcttatctacgaggttcctagagctctgctgacccttggccgaaactctaaaatgtacctattaaagataaatgcttctaccaaagtaaaactctgtgagttgtttcagggcagaatgaccagccagtcagcgttgtttaacaaaataatcagatttttgcctagcactcggttttggtggagctgacgattttgagggctgaggctggttaggagctggaatgtgcctatgtgaccagctcacttgcagacaccctgcgggaagcagagcttaatcttcctaggactgaggtcttagcacatgtactggtggagtttccagaccaccagtatgaataaaagcttgttctgtgtgacccagcaagtggaaggacaaagaactgtgagcctcagatctttggacctttccaatgcgtctctttctcctgttattgctgcaatgtattttcttgcttatattaaagttgtttcatcagt

SEQ ID NO: 231 - DNA, 1911 bp, Homo sapiens
ggcccttgttacagggtcagatgccacagagtttaagacaattccttgtgctacaatctaattggaatttatagtctctttattttttatctcttaatggatatgtctccacttcatccagatagattttgattgaggagtgagttggttatttacctcctgttctcaactctaagtccatcctcctctcctctgctctgatgtgccagggctggaattttgacaaacttcatttgccagcctcccttgccagctagcttcctgttaagttcagtaaatgggaaggccttggggactggaaggtgggagggggaattatttcctgtttctagttcctgaatgtgtcatgcctgtagcaataggtagtagaaaggtagctgctgtctgtagttctaatatttggcatccacttttttgctctttcagtcttcttatatctttattacaagttcctaatattaaatacactctatttttatgactggactctggctgatactagcacttgatactaggtgtggtcataggaaacagattctcaaattctgacattctgggattgatttgatttgttgttagtgttggattggtttgaattgagagctgaactctttgccactagtaatctatggcatgcattgacatcatggttgattaaattatcatctgttcttgctagggttgaataccaatgaaaggcaagtttctggaggccaagtagctgttgcatttaaccattatggtagtaaagatgattataaggaatgtaatgtgggatggctgcttctgattgcaccagggtgcttacaggaagaaactaacaagtttagggctttcacctcaaatcatattcagagcaccagagggcttctaagactgccctgaaagtacctcttattccttctaattacaggaatcactagacatgaaagacatgactgaaaaattcaacccaaatcaatcattcacagactggctaagtctcatatgtgaaagttttctcagtaatttgaaaggagtaggactctgagactaggaatggggacattttggtggatttggatgaaactgagaatgttgaaacccccaagcatccgtgagtttcccttgatagtggaagaagcctctcatttcttgtctaatgatattagcctttccttgtttgaaagcctgtaataagcccatatgaggcacttgccttgcaagggagatccttattctttctcagccccagtgctcccaactctcatggcctttatttagagtcagttcccggaatatacggaggtgggaagagcagagtctagctcagcaggaaaagtcttatacttcaaaagaatcataagattttgttaacttaacattagaggaaaccaggctagtatgtatgggaatgaattctaaaggtattagacccaggagcacagaagataacattgaactggggccaaattaaggtagtcctgatatactacactttccagatagttttggacttaatgttgtagatgattacagtagtggtatcacgccttcatgtaattcctttacacattgatttttggcatggttatgtgcttgctttggataatggaacattattagcaaatgtgatacaaacagagacttggaaagcacttgcacattggggttttctttcttttttgctgtttttggattagactctatgttgaagatgcctggactaacctactgaagatacgtggttttaccaacagccagcaccaataggaagatatgaatgaagccatctgagaccagccatctggcagccaaactgccaactgactgcaaatgcatgaatgatcccactgacaccacgtagagcacaaatgagttgcctccactgagcccagcccaaattgttatcctataaaatcataaaaacat

SEQ ID NO: 232 - DNA, 2048 bp, Homo sapiens
ctaagctacaaattataacagctattgcaaattatggtggtttaccatggaagagatttcagactccccttatctttacttttgctttctctttaacataggtaatgaaatcagacaggtcattgaccattaaagtctgtaacgcgtcctgattctcaagaaatgaaaacgaaacattttctttgcctttgcagcactgctacactttattcaaattcaaagactgctttttaccatgactcagtcagcattttattttgttgtgtcatttttaaagcaaaatttctctttttagaagactatgtgacatgcttctgctcccaaatgaaaatgcaggctccagccatacctgacatggctttttggtttctcttacagaagttcatggattcgaatgccaaagacacaatattggttttgatgcacttgcagtagcacaaagtgaagtcctggcggccttatcctagtttcataaaagaaaaaaaaagttaaagagatggggaagataatagctaaaaaacaacaacaaaaaagctgaattcaaactgcgatgactttatcaaaggactgtcctactgacattcaacataacatcaaaattaacatcaccttgccaatatttgtagttttagtcacaacttttcaactacactctactctcttttggggaaaagaaagttacgcatgctagctgttttcaagtttggcagatgcactttgaaaatactcgttggagagtgagattaaaaacaaaaacgctgtgtaatatttctattaccaggagcaaaattgtttctatgaaaaaatatttgaggaacatctttaatttgttgctggaattgatttgtgtgtgtttgttgcttaattctctgttctggtcaaaaagctgtcaagttggatcaggccgtttgatcctatcctatttccagtcttcttctaggacctgtgagcacgggcaaacactttttaattatcctgatcaagtgtgggggacatccttttgctgaccccacttgtaatcaactgtgatctcctagaagcaggcgaattgattgcttctgtcctccccaactaaccagaagagtaggtcttgcattatcctgggcctttgaaaaacccaactcagtgattgattttgtggctgccggtggcagcaaattcctcagcatgaattctaccaagtgaaaaagtatttcctataacttgctttaaatttccttagcattaacttctctgagtggcccagtcttttatgggacaatgtaataaggatctatcggttttactgcctagtacatatctttaatgcctaagtaaatctctcttatttttccgcccaggcttagtaattctgacttttgaaatctcctgtcgtgaacaaatctacactgcactttatttcttgccccgtcctggaattcagccactcctgcactacatttcttaaggtgaagaagtgaaagacgaagacaccaatccaagtgaacgtgtgttattctcttctataatgctattgtattatattccctcttttttttaaattctcttgatttctctgcacaaaagagggaaattcttccaaagcaacggaaagtttccttgaaatacttttatctagtcacacttacatagtgtaatgtctctctcttacagcattgtacagtttgggatttgtttttaatcctgtggaaaatgtcctaacagggctttggtgtatctttgttccaatttctacattgcttggggagggggagaagctttctttgtattaaatgaaatacacctctacttcattaaataaatagacacctcaaccattagttgctaatgaaacaaaaatctaagtaaaacatctaactatccaaatactacattttctctacctttgccccaaaatgtgcctcatctccctgcacctccaaataatatttctagtgttttcattttattagttttgcaatgtcactgtccagatagaattattcgatgacttaaaacaactttcgtaagattttcaagccctaaattaaaaaatcatatttcaatac

SEQ ID NO: 233 - DNA, 2021 bp, Homo sapiens
gaaaaatcatcccataaatgaatgttgaggttaccaaagtacatcacctgctgaggaaggataaatcttcctgctttaagggagccctgtcatctctcctcttaatgcacgtttcccttggtattagtggaagctgtgttcaagatgggaagcctttcctgcagttcttagaaacacctgctttctaaggagagccttttctaggattagcttatgtgtgttttctctaggcgattttttatttcagttaccaatttaattttcaagttgacagatgctgtgtaaagtctctcataatgagagtagtccattaaattgttgaaagttgcactgcttttcatctttcaggtacctgaaatgagtgacatcaggtatttggaaggagtaagatcataaactgtattcattttcttccttgtacaaagtgatgacttctaatgcttatatctcaaggtattttttaaaaaagcaacggtccctaatagagtaaaatttggttttggtccaagttcccaataatgtatttaatgtttctgttgtttactggtgcctcccgttgcatcaggtagagattgcctgcctctttgtagggcagccttgtggcaccttatgtccaacttggaggatagtatatggcttctttgtgcctctactatcttttcaaaagccattttataaaaatcctaggtagcctattttaatatttaaatatatatatttgtgaaagaacttttagaacagaccttttctttttactttaaaattcctgtatttccatttttaagagtaaatttaatctccaggatttagaagtgtctttccagagaagcataatgagaaagtcagactgaggtaataagaccagaattaagtgatagaagaaactgttgtttggttaaaggacacagatttgaaggaaaaaaattttgatgtaacaattttttaaataaaattttgtttttctgtaatgtcatatttgctgctacagtagctcaatattttacagggctaacataaagctggctccatttaaaaactggagtacttcctagtgcagccagcctaggcggaaactgtacaccatggtcttccagatgggtgactgatggctttgggtagctgatgcatgctttaatatttgcctatagcccggcagcaaggaagtcggggcggggggacttttttaccctgccagttatagcattgtgattctttctgggcactggccttttgtgaaactctcaagggaaggtgatgcaggggagaaaatgtgaattaaattacatagatgggtgtttttatgtcttctacccctttcctagaattagtacaactcttaactgtgccagtccccagttcaccagctttgtatccagtcgtcatctcattcaagtatggctttacttggtgacactggccatagctaagttaacttggcatgtttgacttttgacaataacaaaaatggttttggattttgttttatttccaaaaaatgtatacaatatcagaacttcacattttatatactagtatctggctattagtattttacaggaaccatagttcttggtgactacatatatatatatatttttgtgaccttttttgtaaactaagtgccgtttcaacgttacaatcatttttagggttattgtaatcaatgtgaatatcatgttttttcaaatctgttctgagcctatagtgtttgctttgtgaacatgtgtattgtatatattctgtatagttatattgtactgaaattagcttgtttgatataaggaaaatatgtattgagtacctttttgctagcctgattgtttaatctttttaaaaaaggtttaaactttttttaaaaaaaaaatctttaaactggcctttattacatggtcacacataaagttgcagttaggaaagggatgggcagggaaaaactagttttgagtgtctttagatagaaacatgagactaaggtttgattttgttttcgttttctcattaaaatatcttatgctttatgg

SEQ ID NO: 234 - DNA, 2748 bp, Homo sapiens
gccctctccttccaggcacatttggccgtccccttttctgcgtgtctgtccccaccatcgtgccctcttcttctctggactgcgtttggatgatttctttgaacggtttttattctggaaagttctgctcgagcatctggtatctccctggtgtttgggatgtctccttctcattcccccgtgtcttgctttaagctgcgtgtcctcgtgtttccgctgcccctgttcttgggcactgcgttgtgttctgtctgggatccccgtgcaaggcccctgggtctggtggctgctgcccggcctctgggaccgtctacctgtcccagcccccgtttccccgcttcttcagctggcaccttgaaactccgtgccaggtgagcaggcctgtggctgcaggttcccggaatctgtcgtgggttctgggttgtcccttccagtgcaggcggtggtcaccgcgccaccatgggggtccaggcagcaggatggtcatgtgatgggggccactctgggcttttcattctcctttcatctgtggcctcggaggctccccatgttttctgaggtgcacagaacatggaggggtgctcatctcatgtcagatattggaaggatgtcgtgcaggaaggttcgagggtctcggggtggtcctgagaagccgatgtgataggtgcggcagcttcctcttccctgagcgggggcttcagagcctccctcccactggtgcccatggggtttgagcctgatagctccgcaggattcaactgctgtgagtcacagccaggatggagaggtctaaggcaggcctgatcccggcagggcgacatttctagaaaaggttcatctggtgatctgctaaatggcatgaaaatcacaaaattggcactcagtgaccatcaggctggctgtgtgtggctgctctcctcaacaagcaaatggctgcccccatccagagccccgactcccgctggcctcccccgtgcggtgatgtggggaccagggcaggccccagagaccacctgacctctctggcaggaagaagaccacgtcgtgccgtttcctcctcccttgagcccgatagctgtctcggggaaccggtaagcccagggccaccttgtcacgtcctccactgaacgtgggtccacgtagatgccagccccttggtcttgccagaaagttgtgggaggtgctggttgcaaaggatggctatgcatgtttgtccccatggcagggaggcctctgggggcctggccctacccccgctagctgcttctcacatttttgtctccccgagagccacctgctctccagggccctcaggccccgtctgccagtcttctggcacctgggctggggtctgcgccaggcaacttcccacagcagggcaggatccaccctccacgttatcattactgccatcccctgtgcctgggatggaggccacgcccacccagtggggcccctctggaaaggagacttgacctcagggtggtggcagggctctgtgggatgcccctggtgacagggaccagaatgttccctaaagtggatgtcaggcccctggctcagatggagctttctgttcttgatgggctttagaaggtgaaaaactaggcttccagaggtgaagttgcactgtgggctttgtggcaggtgagcgctgcctgaccctgaacagctgctaaagactcagacctggagcttcctggtgtcctgtgtgtccacgcaggtgtgccagtgtggcagccctgcgccaggagctgcccctgcatgtcatggcagcatccatgccagccgagcgcccctctggctcccaggcatctcatcctgtctggctctgagggccgtgctgcagtgaaaaccattcaccttgacagtttggctttcgaccaagaattcactgtcatatttttgatttttaaaattaagactgtattcagatataatttgcgtaccataaaattcttccttccacagaatatggtttaatggtttttcagtatatgcagccatcatcatctaagttgagaacatttttgtcacccccaacaagaagccccatgcacatggtccgtcactccccaggccccaaatcccagccagcactgatcttggccattggcctgtcctggtcattccatagaagtagagccacgtgactgtgtgtgtgtctgggccacgcgtggctgtgtgtatgagagccatgcgtgactgtgtccgggtcacacgtgactgtgtgtccgggccacgtgtggctatgtgtccgggccacgtgtgactgtgtgtgtccggcctcagcacagtattttcaaggctccttccttccttttcatgactgaatcatactccattgtctgcacagaccacaatctatcccgtcatttgtctctggatgcttgggtggctgcactttgctgctgtgagcacttgtgcacaagctgtcgtgtgaatgtgtgttttcagtaacctgcgtgtacgccgaggactggaattgctgggcgatgtaactgtgttaagctccgaggacctgccagactgttttccacagcagctaaataattgtacgttcctcttagcaatgcataggggttccctgtgtctccatgtcatcaccaacacttgcccaaactaaaaaattctaggccaggcgctcatgcctgtagtcccagcaatttgggaggccaaggtgggctgattgcatgagttcaggatttcaggaccagccagggctacaaagtgaatccttgtctctag

SEQ ID NO: 235 - DNA, 1963 bp, Homo sapiens
ccaggagggaggtgggaggaggtcagagggaaagggcatctgtgtggacagtcaccaggccctgctcccaacccctgcccttcttggcctcagccaagaaaaggagatacaggtatggttaacaaggaaaatgactcactgctccaaatcccagatgccttcaggtaatccctacccctatcttatcaatgcactcagaggtcctgcctttaactggcttctatgttggtctagcaccatcttctgcagagcccaaattgccctgcttccctctctctgcctctaccccttccccaaccaccaggtaggtacctagggtcctccggggaggaagggaggtgaccatggcccccagggataggagcagagagaagactgggatccagcatccatctggctacaactgaaatgctttccctcttccctgacttccctgggtaacccttagggaagggaacctatagaggtgggggtttcaggtatcagattgtccccttctgccttcccttttattcccaggttcaagggggcaggcacagggaagagagatttgatcatctagtcccggttttgcctggatgtgagatgggctcagggcagggagggggtgatgctgtcatccttctcggctggagcaggaagatgaaggacgatgtcagactcattttcagcctcattaggcagcagacggagatggagggaggagagcacgaggctgggggatgggctctgcactgcagagaccagcagggactaaagaagagaggacatggggaactggaaaaataagccttccaggattgtggggagaaagacgctgtgggagaggccaggatgctgcattaggcacaggataacctgggaacccaggcacatgggtcctgctctccgaagtctgcaagtcaagaagggaacagagcacgccgaccctctccctttccctctgtctctcttagtggctttacagtgggtaccctgtcagaaaccagcattgggggccctgccacccccacatggaaggagtgtcctatctgtaaggagcgctttcctgctgagagtgacaaggatgccctggaggaccacatggatggacacttctttttcagcacccaggaccccttcacctttgagtgatcttactccctcgtacatgcacaaatacacactcatgcacacacacactcacacacatgcatacacttaggtttcatgcccattttctatcacactgggctccatgatattctgttccctaagaactgcttctgtgtgccctgttttcatcccaagatttctcacttcatcctctcctacctggctcttttgtcccagggaggggtcctgttcggaagcagtggctgaatttatcccctgaaagtggttttggaggaaccgggatggaggaggccttcccctgtgggaatagaatcgtccactcctagccctggttgcttctgatacacagccactgcacacacacactcacactcacactcccttgtctgatgccccaaagccaattcctggggcaccctaccctctcttatttggagtttccgttggtttacctgagttttctctggggtctgcacagaggcagcagcatggacatcatggcctctcaggtcccttttggttctcagtttcattggttcctctttctgttcccccattgacttctgtgccccaccctagccttttccataaccttaggtattcagtttggaggggttttttgtatttttgaggattcctgtattctgtatcctctcctcgcatctcctcacatggaaagaaataatgtatttgtgccttctgtgaggaatggggggaacaagtggtcccaggtacccccatttccaaggcccccccccctctccaggcgcgcgccgccacagcaataaaagcttccccctgatatccatccctttgtagtttgaacaaatatatttatatgatatgt

SEQ ID NO: 236 - DNA, 2202 bp, Homo sapiens
  misc_feature 2148: n = a,c,t, or g
taacatccctgttaagataggagggggctgaaatcatttgttctccttcacattgaggggagactcaggcacagatgagagacagaggcagagaagttaaataattagtccaaggtcacatcaaatgatttccaactcagctgatgaatctgtctaggtctcggtctccaaatattgcagcttcccttacaatgtaatttgatctcaaacactttacgtgtcttatttttcttcctcctttttctattttggtaaataagatgttttttacacctactgccagattaatgttgggttttaatttagcccttcaagatgatcaatgacttaaccgaggaaactgctgccagaatgtagtttataatgtaccttttttcctatactcgggtttctgcttctgtattttgtacattgtcagtctctgtgggttaagaactttgggactctcaagggtcatcttgacagaggagcttctgcagttgggaattggtacctttctcagagcagtgctattgggaaaaaaaaatctaagcatttttgttctcagcttcacagaggaagtgaagcacattcaagggtagcccattggcttctcgtataggaataggatagatttggcttattttattccttgcttattataatattattattcataagcataccttttcagttaccctcatgatttactatctgtaagagcataagcttactgtttgtgtaatatttgtccctgtattttagatgggagttgctgaggtggtataaggtttggtaactgcatccggcctctcagggaaataaccaagttgttcagattcttagctgtattatgtgaagttgtttgtcagcttcattgcttactactgtgaaataagttataaagaggaacttttaataaaaataaatggattcactcaggggaggggtattcattgttggtgaaatatgtcgaggaccagatgctttttggtctcccaaagacctatcaaactgcagatcttttggctttgtaatatattcagttccacatttattcattcaagatttttgtgtcctcattatgtgccaagtactgggttggacactaggtgacagagatgaacaaatccctaatcttgggatttcacagtggatgttggaatttagtaccgtttagcttcattaggttctgcagtagtcccaagattttccaagatcatcctgtcctccagtgttctattgattcaacttcagaatatatcccagactctgccctctttactcctcactgctgttgccctggtccatctgccatcatctctcacctggattatctcagtagtttccactgggttcttggttccattcttgcctccttctgtctactctcaatataacagctagacaatccttttacaatggaattcagatcatgtttacccctctgttcaaattctccagtgactttccagttttacatgatctggctcctactacctgtctcaattgtgtttcctactactctcctgccctttctcctcttaataaacactgggctcatggtgtttcctttaacatgccaggcatgcttgaccctgtcctgtctcagggccctgctgttccctctgcctggaacattcttcccatagtgtctgcatggctcgctctctcactgctttggattgctgctcaaaagtcaccttatcaaaggcctttcccaaaggtttaaaaatcattctactataaagacacatgcatacatatgtttattgcagcactattcacaataacaaagacttggaaccaacccaaatgcccatcaatgatagactggataaagaaaatatggcacgtaagcaccatggaatactatgcagccataaaaaagaatgagttcatgtcctttgcagggacatggatgaagctggaaaccattattctcagcaaactaacacaggaacagataaccaaacaccgcatgttctcactcataagtgggagttgaacaatgagaacatacgggcacagtggggggaacatcacacaccagggcctgtcggggggtgagaggcaagggaagtgatagcattaagagaaatacctaatgtagattatgggttgatgggggcagcaaaccaccatggcacatgtgtacctatgtaacanacctgcacattctgcacatatatcccagaacttaaagtataattaaagaaaaag

SEQ ID NO: 237 - DNA, 1657 bp, Homo sapiens
gaaagacttggttgcccactgcctaactgtgtacagtgttaccagtgtcccattatggataattctcaatatgttaacacctaggtgttcccaatacctttttcccctcatgtcactactgaattttgacaggaggaaggaatagaatgatagcttgttttatttgtaaagctttcagtgaaacactacatacacgaagaaaaggaacaaggtttaactatttaagaaccatttgctgccgcatagtgccattggatagggaagaacttcagaaatctgtggtactcttggccttgtctttgtcttccctgaacgtgtctccactctgtgaagccagcatctaggggctaaagatgcaaaggaaagcagcatgcattgtctgtacaaatgtgcagcgaaataccccaaagcttttcctactgtacagatctctcgagtctgctttaagtgatttcttttcttcttgattattttcttatatttctatatgtatagtgtaatagccttttgttaactaattttcttttttccttttagtaattaagcacgatcatgtccctttttaagccttacctgagaggaacaatgccttaaaataaaaaagcattaatgagatgaaagtatgcacagaataactttcctctacttattctgtactttgccctcatgagttccaatgttgtgtgaagacaggcagatgctgcacagtgaattgcagatgatattacagaagtgatgtctgtaggtcacattaaatactgacttgagcagtgggtgacacaacacagtgtttgtcttccacagggaagcttaaacaaaagatatttttaacccactgacagaacaacaaggttaagcttcatctgcttggtgtcccagaacttgcacaagcagttgttattgggaaagtacagtcttaaaaccagcacagcagcagtacctacagcctttttttggagagaaagttaaatgctttactggtggggcaggccattctaatcctgacttggtgacgtatcatgtgtattataaaacaagctagccatattaggacactgaagaaagctggaaaaaaaacaagcaacttgacctgaagcacctcagcatctttattttgatgacatatttgtaaggaaaatattcagatgatcaggaatgtatataactgaaatcaagaaaaagaacagtatgcatttaaaaagacagaattatgaaattatatgagtgcttagaatggggctaaggaagtgctgaaatagagcaaaggatggaagataatatagactaccacccactgtaaatgtttgcaagcgcctgtgttttaaatgggattacaacagttgatctctatgaatgtcagagccctaactttcaggctgtgcatttggtatatgggaagaaatatgaccatcctaggtaattaaaccatagacccaaagcccttacgtttgatgcaatttatttttacaataggccttgtttttcagcttcatctgcagttctatgtgaagattgataaatcagtgtttacttgttttattaataaaacagtttttacttgttttattaataaaacgtaatttggatatcttgagttgatggttttgtgatttagctgggtaaactatctttgtaacagataagttatttaaaaatt

SEQ ID NO: 238 - DNA, 979 bp, Homo sapiens
attattattacctgaagaaaataaggctgcattttgaaatgttaagtgcaaaatgactgatgttaaaaccatctgggggaaatcttgggatgctttttcctaggaaatcatatggttgtgatatgttttggcgcataggagacagaaatagtgattatcaggcgttgagcctttttgtagtatttttagtctttgatactctgtaagtgctagttcctaaggcaccaacattgcattccttggtttatactttttctattcatcagggtaggaaatcttaaatccttaggcatccaagaagtatactagctttttgcttctcttttagaaatacttgtggggagagaaaaaaggatggtttgggcatattggtatagtttgagtaaactaaggttaatgttcatataacatttagactttgccataaatatcagaaccaaagatcaagacattcatgtacagtctggaatgtatatatggggcccataaaaattcccagtatgcatgttttatgctcaccattatgaattggggtcttcaaagagagaaggttgaaagtggaaagcacttgaaagggctccccggtttgtaaaatatctttaatcattcacattaggtacctcggagttgcgggtctcagatgtggattcatgcatcatttgtgcagtttgaagatagtccatatttcctatttcagtattaggtcctgcaacacttttcaattcttgtagaagggtttttttcaggagtggtgatgtctgatgctcaattactattttccctataagagtttcagcatgagcttaattaaattcttgtgaaaaaacctgtgtttttagtacacacacacacacacacacacacacacacacacacctacttaaatggaatctaaacatttttagcctttaatccattccattttctaaaactgtcataaactatttttaatcattttaaataaatgtaaaagaaaaat

SEQ ID NO: 239 - DNA, 2193 bp, Homo sapiens
ccttcctgaaaccagtttccatttccttgctcttcctccctgttgcctgatcagtgctctctttttctctgtgtgtctgtctgtcgccctccctccagacaccagccagtaaaccaacccgaaggaaaccgccctgttccctccccctgttcccccccaaggtagacctgggccagaatggtgaggaggtaagtgctgctgttggggctcagaggatgctgtgatgggttttctttcctcttcttgaggaaagtttggaggagggggcaccaaactcatactttaaagctcagactctgtgcagggaatttctccatttcagagtgaatctcctcttaaatgtttcctgaatcgtttactttggaaactaggctcctccctgctcccttttactgaggctcctttatgatttgtcaaggacacgaacactattttccaagcctgagaattttagcaaagagaatgggtcatatattattaacagacccaattcaggagccaggaaagtctgtttattccagactgacttaagtgatcttggaataaggtgtggagaaggtacctggaaagggggctacacttacatagggcaggacggaagcatgagaaaaccccgtgattctgcagtatccttgtaaagcctggctattgttcaagatcactggaagaaaaccagagcgcacaggaggcctcgttgccctcagatataaatagccaacgttaccaacataataaaggctctggtatcatagatcatagccagtaataggttcttagcctgcatattctcctatctttatttatctaattgtagctgcaggagtgccttctccacaccttatgccagcaacccatgaaccttcactgtggtcatagtctgtgccagaaatggatttgtatgttctgtcatctcacctgggaggccaaccccaaaatacagcaagcaagccaaagacaatgtcattccaaattccacttcaacaacctctttattctccccttcttttttggggaccagcatcctgacaatagccattaggtgccctatgtgaacttgggcaagcatcttaatgcctacattttctcatctataaagtgaaacagctgaaatagatcaatggtttcaagcctttttgtcaacctaaggcttataaaccagaagcccacaagataaagcagaaactcatcgctgccccaggccaagtgagatggggaagggaggcctggagccccaaatgctctcagaatactctctccccactgaccaagggtcttattcttggatgagaaccccaaggagcacagtttaaaaacactgaggttttccttgggtctcttcaagtgccaacaatatgattctgggctttatggggtcatcagccagtgctgtgaccaaacacataccaacaacctctctttccagagaatcaacttctccttgtaaccttcaacctctgggctcagtgtctccactgctatgcaatgggttgaggttatggccactcagagcttaatgtgagactgccccctgatagcctgggcttggcccaggagaagtcaccacaccataccgaatcatttttcttatttgtgaaattgaggacaaaatcactacccagatagatcagggaggctggctaggaaagttttatcccatagagtaaaagcagagggagttaggctagtgattgggttaaacagctccatcctggcagctctgtggaaatgcattcacaggtttcaccccatggggcacatcacccagaagttaaatggcttataatggccaagggctggttaagtccaagggcggattttagaaaatcctgcctggagtgacaggctgctcgcacattgaaaggacactacctccagggataaatgatttttcgtggccttgaaattcacatagaagcagggcgtagtcgctcacgcctgtaatcccagcactttgagaggccgaggtgggcggatcacgaggtcaggagattgagaccatcctggctaacacggtgaaaccccgtctctactaaaaatacaaaaaattagcaggcgtggtggcaggcgcctgtagtcccagctactcgagaggcttaggcaggagaatggcgtgaaccccggaggcggagcttgcagtgagcctagatcgcgccaccgcactccagcctgggtgacacagcaagactccgtctc

SEQ ID NO: 240 - DNA, 420 bp, Homo sapiens
ggccagagaggaggccagcaggcccagagtccccaggggaggaggaccaggtcaagggacgttctgtgggcagtagccctgtgtggccctgttcccaccatgagtctggaggccccacctccctggggctcccaatcccctttgccatctctgctctcactggggaccctcctccccttcccacctgctctcatactgctcagtgacatggcccaggctttccttccagggccatgcttggcaaggttggctgagggcaccctccttctctgcacccttggcacgagggcagggctggctctcccaatgcctccatcccatccccatggtgctttggcctcctcaaagcatccaccatggtggatggactgaagtgtgtatattttcttgatctattttttaataaaaaggaaaaggagc

SEQ ID NO: 241 - DNA, 1565 bp, Homo sapiens
gttgtttctgcttgctgatcaggactgcacacagagaactcaccatggaacttgggctgagctgggttttcctggtggctgttttaaaaggagtccagtgtgaggtgcacctggtggagtccgggggaggcgtagttcagcctgggggggccctgagactctcttgtgcagcctctgggttcgtcttcggtgagcgctggatgcactgggtccgccaacctccagggaggggcctggtgtgggtcgcacgtattgacaatgatgggaccaacacagcgtacgcggactccgtgaagggccgattcagcatctccagagacaacgacaagaacacactttatctgcagatggccagtctgggggtcgaggacacggctgtttattattgtacacgcgaattcttcggggactccagctggggccagggaaccctggtcaccgtctcctcagcctccaccaagggcccatcggtcttccccctggcaccctcctccaagagcacctctgggggcacagcggccctgggctgcctggtcaaggactacttccccgaaccggtgacggtgtcgtggaactcaggcgccctgaccagcggcgtgcacaccttcccggctgtcctacagtcctcaggactctactccctcagcagcgtggtgaccgtgccctcagcagcttgggcacccagacctacatctgcaacgtgaatacaagcccagcaacaccaaggtggacaagagagttgagcccaaatcttgtgacaaaactcacacatgcccaccgtgcccagcacctgaactcctggggggaccgtcagtcttcctcttccccccaaaacccaaggacaccctcatgatctcccggacccctgaggtcacatgcgtggtggtggacgtgagccacgaagaccctgaggtcaagttcaactggtacgtggacggcgtggaggtgcataatgccaagacaaagccgcgggaggagcagtacaacagcacgtaccgtgtggtcagcgtctcaccgtcctgcaccaggactggctgaatggcaaggagtacaagtgcaaggtctccaacaaagccctcccagcccccatcgaagaaaaccatctccaaagccaaagggcagccccgagaaccacaggtgtacaccctgcccccatcccgggaggagatgaccaagaaccaggtcagcctgacctgcctggtcaaaggcttctatcccagcgacatcgccgtggagtgggagagcaatgggcagccggagaacaactacaagaccacgcctcccgtgctggactccgacggctcttcttcctctatagcaagctcaccgtggacaagagcaggtggcagcaggggaacgtcttctcatgctccgtgatgcatgaggctctgcacaaccactacacgcagaagagcctctccctgtccccgggtaaatgagtgcgacggccggcaagcccccgctccccgggctctcgcggtcgcacgaggatgcttggcacgtaccccgtctacatacttcccaggcacccagcatggaaataaagcacccaccactgccctggg

SEQ ID NO: 242 - DNA, 1995 bp, Homo sapiens
cctgaagagaacagccaggcctggtgagtcactcctgggagtggctcctccccaccctgccacgcagcggcaactgcgggctgggcctaccccctggtggccacgctccctccgcacccggcctctctctgtggcatgggggcggccatgccccttggtggagatgaatgggagtggagctgggctggctgggcaggcaggggcttgcctcttgctgactaaggcaagccctggaggggcccgaccatggggcaggaacccagatgccatcctcagagcgaggatcattggccgggctcggggatcagggcctctgtggtcccggcacgcctggcccgtgagaccgtactctgcacgactcctccaggtggccagggtcaccggaactggctcgctctcctctgccagttgccggaggtctgggcaccaggccaattctcaccttcccgccagggttaaacattagtgggaggttatcagcgtgggccaggggagggagaggggggaattcaactctgtctcctctgctggagccaccagttcccgcaagcccagacaatgccggtggaggaatttgtggctggctggatctctggtgagacatttttcttcttctgtcacatcacacccaatggtaggtcacttctctggaagatgggtgacatgggaggagcagagaccaaagtctgagttccggcctggcgggaggatcacttgagcccaggagtttgagaccagtctgggcaacatagggaggcccctgtctctacaaaaaaatcaaaataattagctgggcatggtggctcacacctgtagtcccagctacttaggaggattgcttgaactcctggactcgagtgatcttcccaccctagtcttctgagtagctgggactacgggtgtgtgccaccgcacctggctaatttttaatttttttgtagagaggaggtctcgctgtgttgcccaggccgtcttgaactcctgagcacagatagccctcccaccttggcctcccaaagagctggagttacaggtgtgagccactgttgttttctttacccatctcacttgctcagtgggaattaaaaactggctgagagggttcttttaactgacaacaaaattgagcatcaagggccatttgtacccactaatgtccctatctggtctgagatcaacgtgagtccacctcatggtgacctgaattcctgccatttactgggggctccctgtagaaacaatcacagtgttatgatcacagttgatagagaggcagcctcggctcagagacattatgtaacttgtcctaggtcacaccgcgggtaagtcatacaatttgcttagatgcctctgagcttccagccgcagtgtccagttacttagctaccctgctccacctgggcacatggctaccctgctccacctgggcacatggctaccctgctccacctgggcacatgggggtcttctgcgagtcacctaagttcaactccccccacaccaccctgggctagacctgccgggaccatactacgtcacgtgctcatcagagctctccttcaccagatcatgtgctgcagatggctggaggccatctgcaactagtttttgtatttttggtggagatagggtttcaccgtgttggccaggctggcctcgaactcctggtcttatgtgatccacccgccttggcctcccaaagcgttgggattacaggcgtgaggcacctggctctgtccttgttgcaacagtttaggcccttgttgcaacagtttagcaagcttcatcctgactcagtgggtaaggtactgtgagtttctaagtcagtggtaatccaagtgtggtccatggagcaaagcttattagaaatgcagcatctggccagacacagtggttcacgcctgtaattacagcactttgggaggccgaggcgggaggaccacttgaggctaggagttcaggaccagcctgggtgacagaatgagaccctgccac

SEQ ID NO: 243 - DNA, 2212 bp, Homo sapiens
gccggagcagcggcggcgtggcgcagcggcgacatggccgttgtctcagaggacgactttcagcacagttcaaactccacctacagaaccacaagcagcagtctccgagctgaccaggaggcactgcttgagaagctgctggaccgcccgccccctggcctgcagaggcccgaggaccgcttctgtggcacatacatcatcttcttcagcctgggcattggcagtctactgccatggaacttctttatcactgccaaggagtactggatgttcaaactccgcaactcctccagcccagccaccggggaggaccctgagggctcagacatcctgaactactttgagagctaccttgccgttgcctccaccgtgccctccatgctgtgcctggtggccaacttcctgcttgtcaacagggttgcagtccacatccgtgtcctggcctcactgacgggcatcctggccatctttatggtgataactgcactggtgaaagtggacactttcttctggacccgtggcttttttggggtcaccattgtctgcatggtgaaccttaacggtgccttcactgtctttagcaacagcatttacggcatgacccgctcctttcctatgaggaactcccaggcactgatatcaggaggagccatgggcgggacggtcagcgccgtggcctcattggtggacttggctgcatccagtgatgtgaggaacagcgccctggccttcttcctgacggccaccatcttcctcgtgctctgcatgggactctacctgctgctgtccaggctggagtatgccaggtactacatgaggcctgttcttgcggcccatgtgttttctggtgaagaggagcttcccaggactccctcagtgccccttcggtggcctccagattcattgattccacacaccccctctccgcccatcctgaagaagacggccagcctgggcttctgtgtcacctacgtcttcttcataccagcctcatctaccccgcatctgcaccaacatcgagtcctcaacaagggctcgggctcactgtggaccaccaagtttttcatccccctcactaccttcctcctgtacaactttgctgacctatgtggccggcagctcaccgcctggatccaggtgccagggcccaatagcaaggcgctcccagggttcgtgctcctccggacctgcctcatccccctcttcgtgctctgtaactaccagccccgcgtccacctgaagactgtggtcttccagtccgatgtgtaccccgcactcctcagctccctgctggggctcagcaacggctacctcagcaccctggccctcctctacgggcctaagattgtgcccagggagctggctgaggccacgggagtggtgatgtccttttatgtgtgcttgggcttaacactgggctcacctgctctaccctcctggtgcacctcatctagaagggaggacacaaggacattggtgcttcaagcctttgaagatgagaagagagtgcaggagggctgggggccatggaggaaaggcctaaaatttacttggggacagagagcagagcacactcgggcctcatccttccaagatgccagtgagccacgtccatgccattccgtgcaaggcagatattccagtcatattaacagaacactctgagacagttgaagaagaaatagcacaatcaggggtactcccttcacactgatggtaacattcaccttcttttagcccttccaagatgctgccagtgttcgccctagagttattacaaagcagtgtcaaaacccagccatgggctttttgcaacctcccagctgcgttcattccagctgacagcgatatgcaagcaaatgctcagctctccttaccctgaaggggtctccctggaatggaagtcccctggcatggtcagtcctcaggcccaagactcaagtgtgcacagacccatgtgttctggggtgaacaactgcccactaaccagactggaaaacccagaaagatgggccttccatgaatgcttcattccagagggaccagagggcctccctgtgcaagggatcaagcatgtctggcatgggttttcaaaaaaagagggatcctcatgacctggtggtctatggcctgggtcaagatgagggtctttcagtgttcctgtttacaacatgtcaaagccatggttcaagggcgtaataaatattttctt

SEQ ID NO: 244 - DNA, 2521 bp, Homo sapiens
aaaatagtaatttaaagttttgccattttaaggtgacaatatttgggacagtataaatattatagacaagggcccccttgctgtctgctttagcaggtagtgacattaattgacttatagttttgtgtaaatgaacaaactgcttttgacaagaaatttattctgtcctagtttcctgcgtggtaaatcatagaaagattcaagttcatttgggttaaatgtgctaataggatgtagcttttaaattctgctattgagtcagctgtaccttttaatactttaaatgtgttatttgtatggcccttataaaggtgtttgctgtaattctgttaaaagacttcgcctatgccatactggtgtataaaaactgccgcaattggacgccggtgtggtactcatttcagtatacctgaactgtacattttgtgcaatggctttatctaaaagaatgacgcttcgtgaaagcactttgtggccttttttgggggggagggtgagagagtaggagagaataccatgttaagattaaaaaaaaaaacaaaaacattggtcatgtattaagcagaaacagtgttcataacatttttctgggttttaaatatgttgtttcggatatccttaatataaatgttttaggtattctgtgtaccctgtcgtacccccaacattatagaatattgcagtgtgtcattgcaagctttctctgctgtcaccagtgaaacatagtgccctgttaaattcccccactttaacttccttgtgatcaacagtaactggatgtttttgaggtgctcaattggaataaaaatattccaatctatttggagaccaaaggcaaaatcagttttcttacctttggaattattcgtaccttttatggtaaatttcagctttgacatgtattatgaggaacgtccaaaaaccggtttgtaacaaatctgtagagaaggtctgaatctatcgtgttgccttttcaggtgccatttctactgcctaatacaggccatttgccttgtgaagacccataaacattcattgtgttgaatgtaagatagaaactctcctagtcttactgatctcagtccccacaaatgattaagaatgatatgaaaaccagcagctaaggaacatcttattatttagttgtagcatattcataacaagtgtccttcaaggataaacatatattctctatttgatttagcaagtaaaacttgtgttgacctttagtgcattatattcagcttttaacagtattatgtatgtactggaaagcaaagaaatcttagagtcttggacattgtttatttgtgcaacaactagaaaggagcaatgaagtttatttcagttgtatttttccctaagcacaatctgcaatagtttatgtatgacagagataattcaaaaaggaaacctatatataaaagttgtatataaagtttgtctctgaaatatttctttgaagtttttaaaaaattgactcatgtttaaaaacaaaaacacatattcagagcattggacttttttaacttgttttcatctgtttatcatgacttttttatttctggtgtagagtccacattatttagtttgtttacttttaaatttcaaagttcaaatctgaagaattagcgtttgtgatttcgggataccatgcagtggttttaatcccaggaaaaaaactatcaacaaaagttcgtttgattctcattatgaactttgtagaaccatcctttctagatgggtccaccacagtgaatttgtaactttgaagcaggatagaatatcattagattatctgtgagatagcattattatgttaggccagcagagtttgggttggtaaaaataatgtttgctctattactgggtacagacatttcagcatttttaggttggttttaaatcactaaaaatatttattcggatttgaaggatttaagtgctaaaaatcaatccatttcttgcccttcaataattgtccatgcctgccttttgttgtttacatgctcttctgcccagactgttagtaatctagggaccccctttggagctgataagtacagttcagccttttctcctcaaatatataatgactttaacattcctaagaatataggtatttctgaatgatttaaatttgaggaattttaatacataaaatacaatgtacaaactttctgcccactcagatctcttctccatcatgtacttagtatttcccattaacctacacactgatttttatgctactccttgtagaaacaaaattctggtttgactcagtttttgtgtttataaacttttggaatgtgtaccccgtttatgtgaagaattatgacctatcagtcatagctaaatagtgaacctcaaaagtgttaacttttgactattcatgtgaggtttggtatcttgcatttatgtacatggctgtaaattatgtgcatttactctgtatttatgttatctagctgacttttacttgaattgttcaaattttaaaaattaaaatacgctcatg

SEQ ID NO: 245 - DNA, 1814 bp, Homo sapiens
ggagttcgaactggccaacatggtgaaaccccgtctctactaaaaatacaaaattagctgggtgtggtgatgggcacctgtaatcccagctacttgggaggctgaggcaggagaatcacttgaacctgggaggcagaggttgcagtgagccaagattgcgccactgcactccagcctgggcaacaagagcgaaactcagtcttaaaaaaaaaaaaaagggacaaggggctaggaaagttttaagcccttttagaaacctaatcatcaccagtggaggtgatcttgagaaggggtgagcatcccgagaatggccacgattcagaatgagccagtcccgtgtgggggctgtagagaagcgtgatcagagcatagtgtccctggatggatgggctatggaggctttccctgcctctttctaggcccgcctttcttcctcccaactcttgactctgcagctcttggggtgaagccttattcctgatgctccagacgatcaccatctgcttcctggtcatgcactacagaggacagactgtgaaaggtgctggggacttacccaagagcaggctgtgtggttcctgggaaccctgctgggaactcaggtctgggaaagccaaatgatgtggagagattgacaaggactcctgtctccccacccctaggtgtcgctttcctcgcttgctacggcctggtcctgctggtgcttctctcacctctgacgcccttgactgtagtcaccctgctccaggcctccaatgtgcctgctgtggtggtggggagggtgggtaccaggagcaagggacaagatgttgtgggggcagggtcggggggaagagtagaagatcaaagtgtgggggtgttgtacttgggggagcatgggaagagctcaggtgacagagccaaaggtctcaactcctcccctagcttctccaggcagccaccaactaccacaacgggcacacaggccagctctcagccatcacagtcttcctgctgtttgggggctccctggcccgaatcttcacttccattcaggaaaccggagatcccctgatggctgggacctttgtggtctcctctctctgcaacggcctcatcgccgcccagctgctcttctactggaatgcaaagcctccccacaagcagaaaaaggcgcagtagagccagctactggagtcattccgtttccactcattcacccaacctcagggttctccccatctgagccagcctgctggtgtgacttactcatcctccattcctctgcacttgcagactttctgagccagggttttcttttagtggaaacaaatggttgatggatccagatccttagaaaaggagaggatgggggtagagtctcccaagccaaaattttgacatttgagtgctttcgtaagccctgtacatgtactattaattcagtcattcagccaagcctcctcctctagcagcaatttccagctgtttaacactatcctgggcaaatgttttaccctgtcctccagcctccctgcttcccttctggccctggaagactgagtctggacggcagagtggagggactgggaggctgtggctgcctccctccctcagcccggctgggactgtctcccggaccccagtgctggggtgggggaagggggacggagaatgactcaggcagggccccagggtggggtgaggaggttcctgctctggcaggtctaggcggaagggagtggagatggggctggttcctgctgcagtgagggggacagatgggacaataaagactggagactcagttgaataatacaaaactgtttaatact

SEQ ID NO: 246 - DNA, 2648 bp, Homo sapiens
cagaaagtaatattacttcaagtaatgtgggactccagaaagctacacattcaggaatcataggacctagagggtgttctgagaccaaggtagctgtaaggtccataaaaatcagaatttctttaaaacttatgaattgtttattattgagatttttcatttaatttttctggaccacagttgacaattggtaaccaaaaccctggaaaaggggcctactgtaaatatttttctgatgaggtcgctttacttacaatagaaataaaactttaaacaaggtaaagaaaaaaatgagaaatgctaatattaatcttgccttagtgctttattttgaacccaacagatgcttttcacatgtctaactttctcttttctgtactcctgactaaattaatattccttcaaaaaaagtgctgcttgtttacggtttctgcagtagttaattaatcttacaaatggcccaatatgaatgcatcagatattctccatatcaagattcagctccagttctaactgctgactgcctcgtccgctggattctcaggtcgaatttccaagcagggaatccacttgcttcagctcacctttctgagtcagcccatatcagcctggccttctgtgaaatgtccattcttggttcatatccccacatgccccccacttctaaactatgactgagcaacggctacctgagaaccatccttccagcaaaggcttgcaaaggcaggtgcgatggcagctatctatcttgatctgaatcctgtgagaacagtcattatggtttctagccaatcccacagatttgggagtaaactgaacctctttggagaggctcaaaagattcattttgaagcttgcaaagtctaagtagaataagtagctctcttagatgggaccagctaattttatcattttattatatgtattgctccatacccacttggaatgcaagttccaataggcatttatatcttgtgttttgtttactctaaacctcaacactaggaagagttatggcattataaggtacttaaaaaatattttataaatgaatgaatgaacttaaatgtccaaaagggagcagcggagtggccagtagcaaaataaattatgttcacccttatgtaataaaatacattatgtaataaaatacgctatataataaggtacattcaggcatttaaaacatgttgtgtaataagtttggctgggtgtggtggcatgcctttaataccagcactttgggatgccaaagggggtggatcacctgagttcaggctggtctcaaactcttgacctcaagcgatccaccctccttggcctcccaaagtgctgggattacaggcatgagccactgcgtcaagcccttaattttttagtttttgttttttttgggacggggtgttgctttgttgcccaggctggagtacagaagcatgatgatggcccactgcagccgagacctgctgagcttaaaagatcctcccaccttagcctcctgagtagctgggactataggcacataccaccaccctttactttttaaaaacattttctgtggagatgaggactcactgtgttgcccaggctggttctgaaccctggagctcaggcgatcctcccgcctcggcctcccaaagtgttagcattacaggtgtgagccactggccgggctttcttttttctttaaaccatagattaggaatgacttttttgtatattacctattcaataagtgattaaaaagaaaagttatagtcttaagataatctgcaaacagtttgaactactactgaagggggaattaatgaattttataagtataatggtagaaaaatttattctttttcttgaaggtagaacgtaatatagccccaccccacccccccactctggtgcggggcccgggttgagagagaatattaactgcttatccctcctctatgcgcagagaggcttatctgtgttccatcgttttacattccttgaggcacagcgagttcttgcttccctccctagctcggctgtaaagtcacaaagttgataagcaattgctacaaaagcatgtattcccaaggatgtaaaacatatggtgtaacaaatgtaaaagagtaattaactgcctttgatctcgcttctgcaagtacccttcctgcagcacgtaactccctaactcctgccacaaactgcttaaaaggtgattgatccctttgttcagggatcagactttctggaccctagtccgactgcgccagtgatcaccttaataattagacactctcctgaactgtgctcagtctctcccgtctctgatttgtcccacaacactacctaaatgaaagattaatatagaagcatgaatgtgactgggcggggtggctcatgcctgtaaccctggcactttgggaggccgaggcgggtgggtcacctgaggtcaggagttcgagaccagcctggccaacatggcaatatcccgtctctactaaaaatacaaaaattagccacgtgtggtggcaggagcctgtagtcccagctactcaggagcctgagacaagagaatcacttggacctggggagggtgcaggttgcagtgagccaagatcgcaccacttcactccagcctgggcagaagatcaaaactctgactc

SEQ ID NO: 247 - DNA, 2254 bp, Homo sapiens
gtttagcacgttgtaaacactttcaaaaatacattgccatttttaggccaggtgcattggctcgcgcctgtaatcccagcacttagggaggccaaggtgggaggactgcttgggcccaggaatttgagaccaccctgggcaacatgctggaatcctgtttttattaaaaaaagaaaaaagaaactttaaaaaaattgacatatttaaaagatgtaaacaaacatttcaaaaaacatgtcacttgcggcattgaaaattggtataagccttttgaagcacaatttcaagagccataaaaatactttacctagtaatttcattctgagacttaaggaaatacttcaaagtacagaaaaagctatatttacttaatcattcagcacatttctcaaactcccttccatgtgtcagatgctgggctagctcaggatacagtagtatatgttttgcagtgttaatcccagcattatttgtggttgtggaaaaacttgtagctgctatatttctaacagtggagaatgtagctaaataattatatccatactataacattttataaagccattggaagtgttagctcatttatgataagtgaaactaataggctgtgattcaacagtcagaaaaagatgctggggaaaagaacaaaaggaaatactaactaattgaattatagtaagtgggattgagggctctgcagtggggggtttttcttttctcatatttccaaagtttctttatttttttttgtaagatggagttttgctcttgttgcccgggctggagtgtaatggtgtgatctcagctcaccgcaacctccacctcccggtttcaaatgattctcctgcctcagcctccccagtagctgggattacaggctcccaccaccacacctggctaactttgtatttttaatagagatggggtttctccatgttagtcaggctggtcttgaactcccgacttcaggtgatccgcccgccttggcctcccaaagtgctgggattacaagtgcgagccaccacgcccagccccaaattttcttttgtataattatatgagattttctggcttgcttttgaaacaagttaatttaaatcctaatttttcaaatttgttgcatataccatgcttaaagtttttcacacttcataattaatttatgtatgttcgttataaagtggaagcagatatctgtctcagtactaactagcttattctgtcttatgtcaaccctgccagactttgggagagaaagtatttgattagaatagatgggcatgcatttatctctgtagggaaaggtggaaaggcttctggaatccacggtgtgccagggcattgtaggtaattgaaatgtatttttttaatttagcttcataccagctcgtgaaggtgaaaagtattattagccccattttataaagacttagggaaataacaattaagtattttatctgcttaggtcacacaggtaggaaacagtagaatatatattattttgtaaatttataaatttaaaatattttatgaaaatataaatttaaaataaataaaaattattgtattaatcctagtaatggcttattactttttgttttgctttaagaaaattttcagagaatccacatgtttaccagagacaccatctccctcctcctggtccccctggagaggactattcacacaggaggtattcttggaatgtgaagcccaatgccagtcgggcagcccaggatagaagaaggtggtatccttataattactccagactctcctatccagcctgttgggaatggacccagtgatacaaacctgtcctggaattctacctggagaccagagctggcctgaaaattactggtgtgacttttaattagttcaggtctaatcaggtttctttattgttcccttatgtattcaagcttaaggaaaaattgcattgctgtttacctctttgctgataaatttgcagtaattacagcattgcaggaaaaacaatctgttattccagtcttaaatttttctaaaagaagacaatattttagaactgaagcattgagaacttcccttgcaaattatttttaaaattctatcttgtttttctatgtatttctttctgactagacttgtgatatgcgtgtgtttatgtacagaaatttttagtgtttttgttatgttctgttattgacccaaaggccatctttattttctataactgttcaaaatttatattaaaatctacttaggagat

SEQ ID NO: 248 - DNA, 2730 bp, Homo sapiens
tgcagctggagcgcagggctgctggagactaactgtgagctactaacacgggtggaagatagcttttgcaatactcggtttgcatgtgctgaaagtcatctgtcttctgagtcaacactcccgacctggtaaacaacctgctcagggctctggtgaacaagctgtagatcaagtctcgggttctcatgactcccttagccctctcacctccgcggagtaccccagagcccgacctcagctccatccctcaggacgcagccacggtccccagcttggcggccccacaggctctcacagtctgcctctacatcaacaagcaggccaatgcggggccctatctggagaggaagaaggtgcagcagctcccggagcattttgggcccgagcggccatcggcggtgctgcagcaggccgtccaagcctgcatcgactgcgcccaccagcagaagctggtcttctccctggtcaagcagggctatggtggtgagatggtgtcagtctcggcttctttgatggcaaacagcacctgcggagcctgcctgtggtgaacagcatcggctatgtcctccgcttcctcgccaagctgtgcccgaagcctcctgtgcgatgacctcttcagccaccagcccttccccaggggctgcagtgcctctgagaaagtccaggagaaagaggaagggaggatggaatcagtcaagacagtcaccaccgaagagtacctggtgaaccctgtgggcatgaaccgctacagcgtggacacctccgcctccacctttaaccacaggggctccttgcacccctcctcctcgctgtactgcaagaggcagaactctggagacagccaccttgggggtggtcctgctgccaccgctggtggtccccgcactagccccatgtcttctggtggcccctcggcacctgggctgaggcctcagcctccagccccaagagaaacacgacctctcttgaaggaaacagatgtggtaatgtaatgcatgcatcagcttccactgacttaacatcccttgccttgcgcggggagcacagcatctggggaagggggaagtgtggcttgttaaacgtgggaatgctgggagatcagaaatttccacaagtcctttcatggatcttgaggttctcaaaaacagccaaactcaacctttgataagcaaagaaaatcgtgtattagggcaggctaggccacaggatacatagactccaaaatgtacacaggctcaaataccatagaaatttttgttcgagagccaaaggtgaatgttcctgattcatggatgcatctcaatatagggacataggctccatctattttgtggctctgccaccctctacagccttcatgccccatgcattagggaatagaaagggaaagaaggtgtggagaagacacaggtgcttccctgcaatctgaaagtgatgctcatcacttccactcacatctcattggcaaaagctggtcattttgccacacttaaccataagggactctggaagctgtaggttagctctgccaggagaaaggagaaccagaccttggtaaagaattgtctcttgcataggaaggtcaccttcaggatacaaatacatgagcagaggcagagttaggcaaaattcccccaatgctggttggaatgccacttctgtctcatccataaagaaagcttgttggaatgcagtctacaaaagcgctataagggctaaaggattatagtaatagcttgaaggcccttctgattgatgttttaaaaaatcattttcaagcttcagtattttgatagtgcctaaaggccatagagtatagtggataatcactgggactagagccagacagcttgggctgagatgctggatctgctgcttcctgcctaccttttgcaagtcttaacttacctgtgcttcagtttcctcacctataaaattgtgataataataatggcagcacctgcctcataggattgttgggaggattaaatgagttcatacatgcatttagtacaagacctaggaggtaataagagctcaataaatgttagtagttacagcatagatctttttaacacatccccttaacagatcacagcccatcagctccacagctgagaactgctgaagaaagaaggccccaggccaaggagtctgggagtcttcatcttgccaccctgtagcccctcagtgggcaggctctgtcttctgtggcaagtcacatttctcccctgagcataggttccttccaccagtgaccccagcaagccgcacacgtgagctattttgtatgattcaagaccctccacacattctcttccaagagcctcatccaacccagatgagcgtggccctgaccagcttcccctggccaaggatggagaggtagaaggggccccttgccggagaggcgttctgagtgggtagagcgcagattctctctccacagcagctcttaccaaatgtagagatgccctgcaggccactttccaacactgtcatctacagggctctatgagccaggcagattaagtgagcagagccctattttccaaaggagagcaacattgttccatttgattcctaagaacaagagaaagggacaagatctttcacgaaccaacactgtaaagtaaaccaggggcagccttgatttcataggtttgtccccagtgttagcttaatatctggcatgtggtaggtgttcaataaacatgcatcatgtctgtg

SEQ ID NO: 249 - DNA, 1678 bp, Homo sapiens
gtctacataattgcaggagcctgcttgtctctgggttttcgatttgctggctcagaaaacttatcagcatttaactgtttgcataaatttgccaaagattttatgacttatttgtctgcacctaatgcttctgttacaggtcctcataacctagaaacttgtctgagcgtggtgctgctgtctctcgccatggtcatggctggctcaggaaacctaaaggttttgcagctttgtcgcttcttacacatgaaaacgggtggtgaaatgaactatggttttcacttagcccaccacatggcccttggacttctatttttgggaggaggaaggtactctttgagcacatcaaattcttccattgccgctcttctctgtgccctttatccgcacttcccagctcacagcactgacaaccggtatcatctccaggctctccggcacctctatgtgctggccgcggagcccaggcttctagtgcctgtggatgtggacacaaacccgccctgctatgccctcttagaagttacctacaaggggcactcagtggtatgaacaaaccaaagaagaattgatggctcctacccttcttccagaactccatcttttaaagcagattaaagtaaaaggcccaagatactgggaactgctcatagatttaagcaaaggaacacaacacttgaagtccatcctttccaaggatggggttttatatgttaaactccgggcgggtcagctctcctacaaagaagatccaatgggatggcaaagtttgttggctcagactgttgctaacaggaactctgaagcccgggctttcaagccagaaacaatctcagcattcacttctgatccagcacttctgtcatttgctgaatatttctgcaagccaactgtgaacatgggtcagaaacaggaaattctggatctcttttcttcagtactctatgaatgtgttacccaggagaccccagagatgttgcctgcatacatagcaatggatcaggctataagaagacttgggagaagagaaatgtctgagacttctgaactttggcagataaagttggtgttagagtttttcagctcccgaagccatcaggagcggctgcagaaccaccctaagcggggctctttatgaactcggaattcctccctgttgtgaagtgcaccattgataataccctggaccagtggctacaagtcgggggtgatatgtgtgtgcacgcctacctcagcgggcagcccttggaggaatcacagctgagcatgctggcctgcttcctcgtctaccactctgtgccagctccacagcacctgccacctataggactagaagggagcacaagctttgctgaactgctcttcaaatttaagcagctaaaaatgccagtgcgagctttgctgagattggctcctttgcttcttggaaatccacagccaatggtgatgtgactgtgtctggcggtgaacctaccctgaaacgtgacttctgcacaacaaacgtgaccaaacatcaaagctaaagcaatgtttataaagttttatggtataactagggggaaatgagctgcacaaacctcaatgtattttaaatctgttgctgtcatcattaacggtatatgacatataaaagcaagttaaaatttacttttgtaaataaagtttttggtttgtttcc

SEQ ID NO: 250 - DNA, 1595 bp, Homo sapiens
ctcagagaagaaacaaaaattactattaccccacctacttctgaaaaaaggatatgagtctatggcttaccaatacaaaacttaaagaggaagaaaccaaaatctgagtataaggataaaagagccaagcagaaggatagtgaactcagggacatcagggtagggaaagctgcagcagtgatggagcacaaggctttgctatgagcttcctggaagccaatgtaaagaagaaactgagctcatttgcttgctaaaaaacaccagatcatcagggagacatcctttccccggtcttgagctagaagaggatatttgctggatgggtctttctaaaagggtcaaagtactggctggtgggaggggtcaccagcagcaggtttgcccaacacacggaaacgctcctccctgcattgctgcctccccatcgagcctccttggcagatagggatctcaggcagagtcgctttgtaaaggctattccagggggctcgggccagggctgtgtgacatgagagtagctcagagggacttgctgtgggggtggccctgacatacagggatgagagaggagtgccaccccgagcttacccttctgggacatgaccccctggactggctgctgaatttgtgcaacagcagaggagtcacagttgattttctggccctgccagcacctgcggggcaggtgttttctgtgacagttggaaataggcccatgttcttcactctttcatccagcaagtgctttccagcttatgccaggccctgggctgagtactgtgggcacattgggcaccatggcagacacaatgcctgtggtgataactgccacccagaaaatagccaggtgctgcaggagcccagagggagacatggggatgaccaggaagcctgggggtggcagggaaagctttctgcaggtaatgtgggagctgagatttgaaaaatggagagaagttagcccagtggaaaaggagagcaagaacagcaggtggtgggaacagcatgcgcccaggcctagagccaggacactgtgtgctaagtttggggaagatgatggaaggagatgctgttggatgaggtggaaggggagggggaccgggccagcacaggtggtgcacacctcaccacagagcgtggcttctaccgtgaaaggggagggagggccaggcagggacaggagggaccagggtgacgtggaatggggagaaggcagagtccacctagcttttgcccacatagatggcctcccggcctatgggttgagggcagccgactcctgcctcccaacctgttcacatggctactacctggagctgtccttctggagacacctgaggacgaccagaaaccataacgaggacgccttttcacatccttcgcatggcaggatccttctccccactgcatagatgtggaaactgacctcaagatgactgttttaaagctatgtgggctgggggcagtggctcacacctataatcccagcactttgggaggctgaggtgggcagatcgcttgagcccaggagttcgagaccagcctgaacaacatggcaaaaccctgtctctgcaaaaaataaaaaattagccggg

SEQ ID NO: 251 - DNA, 3548 bp, Homo sapiens
ggagaaaaaacctaacaaaaaggaggaactgacactagtgaataatgttttaaaactggctactaaactgctaaaggagttggacagtccttttagattatatgggcttacaatgaatccgctgctttataacatcacccaggttgttatcctgtcagctgtttctggtgttatcagtgacttgcttggatttaatttaaaggtaagaggttgcaagtactttttatttcttagtttcctgttgcatttttgttgcgcccattttaccctcacatgcacagtaatgcggtcattttggtaagattgcaattattgaacatttcacatttaatttcaaagaattatatgtatttatgttttataatactgcaggaatttctaacttggaacagtatttattataaatagaagtcttgtgtaggataagtagaagtatttggttttttttattttttattttgagatggagtctgctctgttgcccaggctggtgtgcagttgcgcgaccttggctcactgcaacctctgcctcccgggttcaaggatttctcctgcctcagcctcccaagtagctgggactacaggtgtgcaccaccacgcctggccaatttttgtatttttagtagagaccgtgtttcaccatgttagccaggctggtctcgaactcctgacctcaagtgatacacccaccttggcctcccagagtgctgggattgcaggtgtgagccaccgcgcctagcaagaagtatttatttttactaataaagctttaatttaggtgataaaaaagaaaaaagccttatttctatttttggccaaaagttgtattatttatctgtatagcaatgcatacatcttccaatatatgcacaactaactgttaggaaggtgtaagataatcatattaaacaagtactgtgtgtgtatatatatatatatatatatatatatatatatatatatatatagccacttctcaagagaaagcaatagaaatctgattttcacatttttgtttgtgtttaaggtgagttcttcttaaaaggataaaggagttaaaatattagaaactgcacttgtttgtgaatgaaatttgaatttaaaaatggtgttatatgatataatttaagctttgatattaaaactggcttgtcaccacttctattttttttttttctagctatggaagattaaggtcatgacaattcaaagaaaagaagatgtagcctcttttccagaataagagtactgactaagctgcctgaaagcttgtcactgattctttgcttcaggagtctcagctagggagttgaagtgtttacatcagactgtcttgtgcaattcttatatttattttactggttcacttttttttacatttattttagtctttatatttttatttttaagcattgatgtacttagttgttgaaagggtgatgaaactgatatccagatacttgagatcctggtaattggtcataaataattggcaaaataacaaattgtgaaaatagaagccattgctcagcaccgtttctccatcaatgccgtgaacttgccttacttgaggaaaaattctttaactttggaatattgcattgaactcagctatacacataaaacattttctttggtaaatcaagatccagtcagggtttctcttgaattattttggaacaatgccaggatccaaactgattaagttacagtttaagcacccttcagtattaatatatacggtattatataacaggtcaacaagtgctctttgatgataaaacttgtaatagagcaataattgtaaatggttaccatactgtaagatattttgataaaaattaactagtaatacttgtatttatttgaaacactgggctgtttgcacagctccaactgtgcatgctcaaaatgtgcactttttaaaattgttacttttaatgcgtatctttatatgggatctgttatagtatactagggcatgatatggtatccttttgattgaggtatatactcatctcacaagtgaagtgcctactgatattactaaagtacattatgtttactcaagtaaataattttctccccatggtacactctagtgtaggctattcataccacactgaaatgaacaactgaagaataaggctaagaaccaataaaatatttctctaattgctagttgtaaaactgtatccaaattttcagaaaagacagcttcagcttgcaaattctatcctctaaacttatctggtgcattctccccaccccacccccattatataagggctattttagatgcttttaacctccccaacaaataatttgccaagtgtccaatgagaacttatcatgttggtgtgttaggtaaatcgggcaaatatgatagtgtcttacattgggccttgattttaagttgttatatttgtacaatcgagtattttagaaattacatgaaacatgaaacagtttttgcaattttttttaaactgggcatctggtttctaaaaatttatttgaaacaatctagaattttcttggtgcaaagtgtatcatgtggaatatcctcatatttttaccatattttaagaactttaagacgattaattgtaaataatttatttgattggtgcagttctaatccctaaatcataatcttaaaatcaggaatgtgtggagaacagagccatgtcatatcactttgctcttaccattccttttgatcagcctcaattcagcctcattgtgtagtatgttttttctttctatgaaaaacaacagaaagcatttcattttatttgcctatgttcaaatatgtttaataatgaccaaagtgcattctgagttttttcaaggaatgtaatactggagctttaagaacatacttagtttctcatgtgaaaacttaggctttgtctgatgtttttccttcctctattgtctaatgttgaggttgtttttaagaattatgttttataaactttttcaatataaggtacatgcctatacagaacttaacattttgcacagaatatatcaaatatattttgagaaaaaaagtacggcatgagttctgttaggaataaaagatgaaactattgtatctcacaaaaaatcttatttcagaatggaaatatttttgagaaaagtagctgagtatactggtttaagaaaatgcttgttttagattgaggttaacttagagttgggagttgatttattaagtacagtatacctctcaacagtttataaataatatgttgaattatgtcagtgtgggcagcagtagaatactaaaaggaaaatgtcatgttaagcaatttcagaacattaactgaactattttcaaagcagaaaaattgacattgctgcctttaagaataccatgaatgtaagaaattgaaagaaattgtaaaatatcacataatatagaaatggcagttcaaagagaattgtggcagatgttgtgtgtgaactgttgtttctttgccacatgtgttgtatttgaaagttttacagtaagtttaaaataaaacattctgtgactg

SEQ ID NO: 252 - DNA, 1850 bp, Homo sapiens
cggatcccgagcgcggggaggcagaccgactgtgagctgcttgtccccatcctgcggccgtcctggggacacagagccctccgtggtgcccggggattggattggagccaggacctcacttcctcctctgcccctgcccctgcccctcccagcacctggcccacaccctgcagcccgccccatggtctggccctgggtggcgatggcgtccaggtggggtcccctcattggcctggctccgtgctgcctctggctcctgggggcagtccttctgatggacgcgtctgcacggcctgccaaccactcgtccactcgagagagagtagccaacagggaggagaatgagatcctgcccccagaccacctgaacggggtgaagctggagatggacgggcacctcaatcgcggcttccaccaggaggtcttcctaggcaaggacctgggtggctttgatgaggacgcggagccgcggcggagccggaggaagctgatggtcatcttttccaaggtggatgtgaacactgaccggaagatcagtgccaaggagatgcagcgctggatcatggagaagacggccgagcactttcaggaggccatggaggagaacaagacacacttccgcgccgtggaccctgacggggacggtcacgtgtcttgggacgagtataaggtgaagtttttggcgagtaaaggccatagcgagaaggaggttgccgacgccatcaggctcaacgaggaactcaaagtggacgaggaaacacaggaagtcctggagaacctgaaggaccgctggtaccaggcggacagcccccctgcagacctgctgctgacggaggaggagttcctgtcgttcctccaccccgagcacagccggggaatgctcaggttcatggtgaaggagatcgtccgggacctggaccaggacggtgacaagcagctctctgtgcccgagttcatctccctgcccgtgggcaccgtggagaaccagcagggccaggacattgacgacaactgggtgaaagacagaaaaaaggagtttgaggagctcattgactccaaccacgacggcatcgtgaccgccgaggagctggagagctacatggaccccatgaacgagtacaacgcgctgaacgaggccaagcagatgatcgccgtcgccgacgagaaccagaaccaccacctggagcccgaggaggtgctcaagtacagcgagttcttcacgggcagcaagctggtggactacgcgcgcagcgtgcacgaggagttttgagcgcccggccgcgccccgcgccgccccccacgcaccaccggggcggcctcgcgggtgactccgggctccgtggctgtcccggaccccacctcttccctgccgcccgccaccggccgaccgaccgcggctgccccagttgatgagcggcgtgtcccctttgcagcgcgcaccccggcggggctttggctgtgacgcggtcggggcgcggggctgggctgtggccccgcggcgccgcctcctccctggtccctcgaaatcgtggcatctcacttctgagaacgaaatctcgcttcagtcactctgccgaaggcgctgacggcatcgcggccggaacctctgggcccggcccctcccagggccgccgctccgtgggaaaaaacagctcctccatttccttgaaaactgaacgattattaaaaatagattaaacttcgctggaaatgagtagccaggaagttcaggggagggtgccgggtccttcccgggcctggcgtgtcggagccacccaggtcccgcagctgccgctgagaaaatgcaaatatttgttgtgacaagaatcacatacatttactttaaatat

SEQ ID NO: 253 - DNA, 1767 bp, Homo sapiens
gcaggaccttgcttatgaacgtcagtatgaacagcaaacctatcaggtgatccctgaggtgatcaaaaacttcatccagtatttccacaaaactgtctcagatttgattgaccagaaagtgtatgagctacaggccagtcgtgtctccagtgatgtcattgaccagaaggtgtatgagatccaggacatctatgagaacagctggaccaagctgactgaaagattcttcaagaatacaccttggcccgaggctgaagccattgctccacaggttggcaatgatgctgtcttcctgattttatacaaagaattatactacaggcacatatatgccaaagtcagtgggggaccttccttggagcagaggtttgaatcctattacaactactgcaatctcttcaactacattcttaatgccgatggtcctgctccccttgaactacccaaccagtggctctgggatattatcgatgagttcatctaccagtttcagtcattcagtcagtaccgctgtaagactgccaagaagtcagaggaggagattgactttcttcgttccaatcccaaaatctggaatgttcatagtgtcctcaatgtccttcattccctggtagacaaatccaacatcaaccgacagttggaggtatacacaagcggaggtgaccctgagagtgtggctggggagtatgggcggcactccctctacaaaatgcttggttacttcagcctggtcgggcttctccgcctgcactccctgttaggagattactaccaggccatcaaggtgctggagaacatcgaactgaacaagaagagtatgtattcccgtgtgccagagtgccaggtcaccacatactattatgttgggtttgcatatttgatgatgcgtcgttaccaggatgccatccgggtcttcgccaacatcctcctctacatccagaggaccaagagcatgttccagaggaccacgtacaagtatgagatgattaacaagcagaatgagcagatgcatgcgctgctggccattgccctcacgatgtaccccatgcgtattgatgagagcattcacctccagctgcgggagaaatatggggacaagatgttgcgcatgcagaaaggtgacccacaagtctatgaagaacttttcagttactcctgccccaagttcctgtcgcctgtagtgcccaactatgataatgtgcaccccaactaccacaaagagcccttcctgcagcagctgaaggtgttttctgatgaagtacagcagcaggcccagctttcaaccatccgcagcttcctgaagctctacaccaccatgcctgtggccaagctggctggcttcctggacctcacagagcaggagttccggatccagcttcttgtcttcaaacacaagatgaagaacctcgtgtggaccagcggtatctcagccctggatggtgaatttcagtcagcctcagaggttgacttctacattgataaggacatgatccacatcgcggacaccaaggtcgccaggcgttatggggatttcttcatccgtcagatccacaaatttgaggagcttaatcgaaccctgaagaagatgggacagagaccttgatgatattcacacacattcaggaacctgttttgatgtattataggcaggaagtgtttttgctaccgtgaaacctttacctagatcagccatcagcctgtcaactcagttaacaagttaaggaccgaagtgtttcaagtggatctcagtaaaggatctttggagcc

SEQ ID NO: 254 - DNA, 286 bp, Homo sapiens
gctcctcgcgcgctcgcgtcccctcgtgcgggctccagccgcagccttagcttcggctcccggcttgggtggcgcggccgtgccctcgttttggcctccgaacgcggctcgaatggcaagccaaaattccttccggatagaatatgatacctttggtgaactaaaggtgccaaatgataagtattatggcgcccagaccgtgagatctacgatgaactttaagattggaggtgtgacagaacgcatgccaaccccagttattaaagcttttggcatcttgaagcga

SEQ ID NO: 255 - DNA, 1896 bp, Homo sapiens
cccgtttgaacctgtgtgcccggagaagaactcgagtccagcggcctatcgtcaggcttttgagttgcccaggaactgtggccaaagaccttaggagagacgagcagccttcagggagcgtggagacaggctttgaagacaagattcccaaaaggagattctctgagatgcaaaatgaaagacgagaacaggcacagcggactgttttaatacattgcccagagaaaatcagtgaaaacaagtttcttaaatatttatcccaatttggacctattaataatcatttcttctatgaaagctttggtctctatgctgtcgtagaattttgccaaaaggaaagcataggttcactgcagaatgggactcatactccaagcacggccatggagactgcaattccattcagatcacgtttcttcaatctgaagttgaaaaaccagacttctgaacggtcacgcgtacggtcaagtaatcagttgccacgttcaaacaagcagctttttgaattactttgttatgcagaaagtgtaagtttttaggtgtacctcaacttttagaactatgtatttttttatgaacaataaagattcctgtaaaatattcaagctacattattgtttaatgggtatagatcttcagttttacaaggtgaaaagagttacggagatgaatcgtggtggtggatgcataatgagatgaaggaaagtttttttctatttctagctttctaagaatgtcgtcatgctcaacacattgagtagatgttgagttttgacatttgagatggtattgatgactggcatatggtcttgagattgtatatggttcctaatgtctttttctttcccctcctaatgtcttaacgtagtgaattgtagattcactgtagatttcctcatgtcaagtcattcttgcattcacagaataaaccctacttagtcaaggtgtatttacaaaaatgcattattacatttgtcgtgctaatatttttattacaattttaatatctctataaataaatgggattgcttttaaaaattcaaactacaggatatgttgaatgaaaagtgatagtaatccttgtctgctccttccccgccatgccccatttgtacttacaggtaaccacattcttctgaagttttcggccttttgaacagtttaggttttctttctctttccagcataatgacataaaattgtacatggttttctgtcaattttaaaatgtcttctttctgattctctctctcttttttttttttttttttgagatggagtctcgctcttgcccaggctggagtgcagtggcatgatcttggcttactgcaactgctccccgattcaagcaattgtcatgcctcagctgctcaggaggctgaggcaggaggatctcttgagcccaggattttgaatccatcgtggacaacatagcaagattccatctctaaaaaaaatgaaaataaacataagccacaaggaatgggtgaaagattattgtaatgtgctttaactaaataggtaaatatactaaacaaatgctaaaactcagttttaggatgaaaccattgttgatatccacatcagtccctgtttagaaaacatttaaaatgacttttagttatgtacagtacgttggcaatgaatacattaagcttcaaaatttggtagtgctctcgaatatgtatatttgtatttttcaagcgaagttctcttattcacatataaattaaagtgggttggtactgatatcaaaaaatgtttatgtttttagaacagacatttcagtcactgcattcttaggtattccaaaccaaatatgatgacatcattagattgcttttaaaaatattgattgatttttctattttcaaaaataaaattctgtttctaact

SEQ ID NO: 256 - DNA, 1896 bp, Homo sapiens
cgacaaaatggtttgctttaccatctgggtattggcagctgctctctgcatcccagaaatcttatacagccaaatcaaggaggaatccggcattgctatctgcaccatggtttaccctagcgatgagagcaccaaactgaagtcagctgtcttgaccctgaaggtcattctggggttcttccttcccttcgtggtcatggcttgctgctataccatcatcattcacaccctgatacaagccaagaagtcttccaagcacaaagccctaaaagtgaccatcactgtcctgaccgtctttgtcttgtctcagtttccctacaactgcattttgttggtgcagaccattgacgcctatgccatgttcatctccaactgtgccgtttccaccaacattgacatctgcttccaggtcacccagaccatcgccttcttccacagttgcctgaaccctgttctctatgtttttgtgggtgagagattccgccgggatctcgtgaaaaccctgaagaacttgggttgcatcagccaggcccagtgggtttcatttacaaggagagagggaagcttgaagctgtcgtctatgttgctggagacaacctcaggagcactctccctctgaggggtcttctctgaggtgcatggttcttttggaagaaatgagaaatacagaaacagtttccccactgatgggaccagagagagtgaaagagaaaagaaaactcagaaagggatgaatctgaactatatgattacttgtagtcagaatttgccaaagcaaatatttcaaaatcaactgactagtgcaggaggctgttgattggctcttgactgtgatgcccgcaattctcaaaggaggactaaggaccggcactgtggagcaccctggctttgccactcgccggagcatcaatgccgctgcctctggaggagcccttggattttctccatgcactgtgaacttctgtggcttcagttctcatgctgcctcttccaaaaggggacacagaagcactggctgctgctacagaccgcaaaagcagaaagtttcgtgaaaatgtccatctttgggaaattttctaccctgctcttgagcctgataacccatgccaggtcttatagattcctgatctagaacctttccaggcaatctcagacctaatttccttctgttctccttgttctgttctgggccagtgaaggtccttgttctgattttgaaacgatctgcaggtcttgccagtgaacccctggacaactgaccacacccacaaggcatccaaagtctgttggcttccaatccatttctgtgtcctgctggaggttttaacctagacaaggattccgcttattccttggtatggtgacagtgtctctccatggcctgagcagggagattataacagctgggttcgcaggagccagccttggccctgttgtaggcttgttctgttgagtggcacttgctttgggtccaccgtctgtctgctccctagaaaatgggctggttcttttggccctcttctttctgaggcccactttattctgaggaatacagtgagcagatatgggcagcagccaggtagggcaaaggggtgaagcgcaggccttgctggaaggctatttacttccatgcttctccttttcttactctatagtggcaacattttaaaagcttttaacttagagattaggctgaaaaaaataagtaatggaattcacctttgcatcttttgtgtctttcttatcatgatttggcaaaatgcatcacctttgaaaatatttcacatattggaaaagtgctttttaatgtgtatatgaagcattaattacttgtcactttctttaccctgtctcaatattttaagtgtgtgcaattaaagatcaaatagatacatt

SEQ ID NO: 257 - DNA, 1590 bp, Homo sapiens
cttagccctgcattccagggcctatccacttgctgatcagcactgagcaccgaggtttcaccatggaggtggggctccgctgggtcttccttgttgctttcttagaaggtgtccagagtgaggtgcaactggtgcagtctgggggaggcctggtcgagcctgggggctccctgagactgtcctgttcagcctctggtttcagtatcggtgaacattatcttcactgggtccgcctgactcctgggaaaggtctggagtggatctcgtccattagtcgaaatggactttacgtctactacgcagactcactgcagggccgatttgtcgtctcccgggacaacaccaaaaatgcccttttcctacaaatgaccagcctaagagtcgaggacacggcaatatactactgtgcgagagattttaatcaagtgaatggctatcaattcttggaccattggggcccgggaaccgcggtcagcgtctcctcagcatccccgaccagccccaaggtcttcccgctgagcctctgcagcacccagccagatgggaacgtggtcatcgcctgcctggtccagggcttcttcccccaggagccactcagtgtgacctggagcgaaagcggacagggcgtgaccgccagaaacttcccacccagccaggatgcctccggggacctgtacaccacgagcagccagctgaccctgccggccacacagtgcctagccggcaagtccgtgacatgccacgtgaagcactacacgaatcccagccaggatgtgactgtgccctgcccagttccctcaactccacctaccccatctccctcaactccacctaccccatctccctcatgctgccacccccgactgtcactgcaccgaccggccctcgaggacctgctcttaggttcagaagcgaacctcacgtgcacactgaccggcctgagagatgcctcaggtgtcaccttcacctggacgccctcaagtgggaagagcgctgttcaaggaccacctgaccgtgacctctgtggctgctacagcgtgtccagtgtcctgccgggctgtgccgagccatggaaccatgggaagaccttcacttgcactgctgcctaccccgagtccaagaccccgctaaccgccaccctctcaaaatccggaaacacattccggcccgaggtccacctgctgccgccgccgtcggaggagctggccctgaacgagttggtgacgctgacgtgcctggcacgtggcttcagccccaaggatgtgtggttcgctggctgcaggggtcacaggagctgccccgcgagaagtacctgacttgggcatcccggcaggagcccagccagggcaccaccaccttcgctgtgaccagcatactgcgcgtggcagccgaggactggaagaagggggacaccttctcctgcatggtgggccacgaggccctgccgctggccttcacacagaagaccatcgaccgcttggcgggtaaacccacccatgtcaatgtgtctgttgtcatggcggaggtggacggcacctgctattgagccgcccgcctgtccccacccctgaataaactccatgctccccc

SEQ ID NO: 258 - DNA, 2825 bp, Homo sapiens
tcccgatcaagatcgtattcacctagaaggcggccaagcccaagaaggcggccatctcctcgaagaagaactccgccaagaagaatgcctcctccaccaaggcatagaaggagtagatctccagtaagacgaagaagacgttcgtcagcatccttgtctgggagtagctcatcatcctcttcatctcgttcacggtcaccaccaaagaagcctcccaagaggacatccagcccccctcggaaaactcgtaggttatctccttcagcaagtcctccaaggcgaaggcacaggccatcacctcctgcaactccaccacccaaaactcggcattcccctacaccccagcagtcaaaccgtacaagaaaaagtcgtgtttctgtgtctccagggagaacttcaggtaaagtgacaaaacataaaggtactgagaaaagagaatccccttcaccagcaccgaagcctagaaaagtagagttatctgaatcggaagaagataaaggtggcaaaatggctgcagcagattctgtgcagcagagacgccaatacagacgacaaaaccagcagtcttcatctgactctggctcctcctcctcctcagaagatgaacgacccaagagatcccatgtgaagaatggtgaggttggcaggcggcggagacattccccttcccggagtgcttctccatcaccacgaaagcgccaaaaagagacttcccctcggatgcagatgggaaagcgatggcaatcgccagtgactaaaagtggtagacggaggagaagtccatccccaccacccaccagaaggcgacggtctccttctcccgcccctcctcctcgacggcgcaggactcccacaccaccaccacgacgaaggactccttctactcccccacgtcggcgctcaccttctcctagaagatactctcctccaatacagaggagatactctccttctccacctccaaagagaagaacggcttcacctcctccccctcctaaacgaagagcatcaccatctccaccaccaaagcgggcgggtctcccattctccacctcccaaacaaagaagctccccagtcaccaagagacgttcaccttcattatcatccaagcataggaaagggtcttccccaagccgctctacccgggaggcccgatcaccacaaccaaacaaacggcattcgccctcaccacggcctcgagctcctcagacctcctcaagtcctccacccgttcgaagaggagcgtcgtcatcaccccaaagaaggcagtccccgtctccaagtactaggcccattaggagagtctccaggactccggaacctaaaaagataaaaaaggctgcttccccaagcccacagtctgtaagaagggtctcatcctcccgatctgtctccgggtctcctgagccagcagctaaaaagcccccagcacctccatcccccgtccagtctcagtcaccgtctacaaactggtcaccagctgtaccggtcaaaaaggccaaaagcccaacaccgagcccatcaccgccaagaaattcagatcaggaaggaggtggaaagaaaaagaagaaaaagaaggacaagaaacacaaaaaggataagaagcacaagaagcacaaaaaacacaagaaggaaaaggctgtggctgcagctgctgcagctgctgtgacccctgcagccattgcagctgccacaaccacattagcacaggaagagccagtggcagcgccagagccgaagaaggagactgaaagtgaagctgaagataaccttgatgatttagaaaagcacctgcgtgaaaaggccctgagatcaatgaggaaggcccaagtgtccccacagtcttagggggaaatgtttgttatgatgtaaattttatttggtttgtacgcagttcaatttcaaaattgctaaaatgtgtttgagctttagactataacatttgttgtaataattgctaggttgaagttcaacatgtaaaaaaagggggcatggatttacattgcaaaaggtgtccacagtgtattagtgacattctttcattgacagctgacataattcattgagtgaaatattttaagccaaaaaaaaattccctttttaaaaaagggggtttaaatactgttggcatttttatggttcctttaaatgccctagctattcccagaggggtttttttgtttgtttttttggttttgattttctttttgtttttctttcttcttcttatttttttcatttgagtcttagctcccatttaagttatgcttctgaccttgtatggtctgtaagcttgcccagaaataagaccactgttttgaactaccacaaaagtataaatgaatattttaatgccacaatctttcctgttgcctgtggagtctctgctgaaatgaatcaggattcgagctctaggatgagacagaaaatgaaagcatgttgtttgccaggacactgtgggtttatattgatgtgtaacaagttgatttggaacactggactctcattctgttattctggttttgttttttttgttttgttttttttcttttgtaaaggcaatgagctagtcccagaaaggatccttcagttacatacaatttgtttaatgaaatgtcatggctctgttcatatttttgtcttgttcttccaattggtatatacaactttcagagcctcttgtatttggaaggctggaagggcccagactttggaatagtgtcttggtttcactgtttttgttttgattttttttttgttttgattttttttaaactaaagctatataaagcttgtggattaaacagaataaatttctaaattt

SEQ ID NO: 259 - DNA, 2296 bp, Homo sapiens
ggagtgagtagctgctttcggtccgccggacacaccggacagatagacgtgcggacggcccaccaccccagcccgccaactagtcagcctgcgcctggcgcctcccctctccaggtccatccgccatgtggcccctgtggcgcctcgtgtctctgctggccctgagccaggccctgccctttgagcagagaggcttctgggacttcaccctggacgatgggccattcatgatgaacgatgaggaagcttcgggcgctgacacctcgggcgtcctggacccggactctgtcacacccacctacagcgccatgtgtcctttcggctgccactgccacctgcgggtggttcagtgctccgacctgggtctgaagtctgtgcccaaagagatctcccctgacaccacgctgctggacctgcagaacaacgacatctccgagctccgcaaggatgacttcaagggtctccagcacctctacgccctcgtcctggtgaacaacaagatctccaagatccatgagaaggccttcagcccactgcggaagctgcagaagctctacatctccaagaaccacctggtggagatcccgcccaacctacccagctccctggtggagctccgcatccacgacaaccgcatccgcaaggtgcccaagggagtgttcagtgggctccggaacatgaactgcatcgagatgggcgggaacccactggagaacagtggctttgaacctggagccttcgatggcctgaagctcaactacctgcgcatctcagaggccaagctgactggcatccccaaagacctccctgagaccctgaatgaactccacctagaccacaacaaaatccaggccatcgaactggaggacctgcttcgctactccaagctgtacaggctgggcctaggccacaaccagatcaggatgatcgagaacgggagcctgagcttcctgcccaccctccgggagctccacttggacaacaacaagttggccagggtgccctcagggctcccagacctcaagctcctccaggtggtctatctgcactccaacaacatcaccaaagtgggtgtcaacgacttctgtcccatgggcttcggggtgaagcgggcctactacaacggcatcagcctcttcaacaaccccgtgccctactgggaggtgcagccggccactttccgctgcgtcactgaccgcctggccatccagtttggcaactacaaaaagtagaggcagctgcagccaccgcggggcctcagtgggggtctctggggaacacagccagacatcctgatggggaggcagagccaggaagctaagccagggcccagctgcgtccaacccagccccccacctcgggtccctgaccccagctcgatgccccatcaccgcctctccctggctcccaagggtgcaggtgggcgcaaggcccggcccccatcacatgttcccttggcctcagagctgcccctgctctcccaccacagccacccagaggcacaccatgaagcttttttctcgttcactcccaaacccaagtgtccaaggctccagtcctaggagaacagtccctgggtcagcagccaggaggcggtccataagaatggggacagtgggctctgccagggctgccgcacctgtccagacacacatgttctgttcctcctcctcatgcatttccagcctttcaaccctccccgactctgcggctcccctcagcccccttgcaagttcatggcctgtccctcccagacccctgctccactggcccttcgaccagtcctcccttctgttctctctttccccgtccttcctctctctctctctctctctctctctctctttctgtgtgtgtgtgtgtgtgtgtgtgtgtgtgtgtgtcttgtgcttcctcagacctttctcgcttctgagcttggtggcctgttccctccatctctccgaacctgttcgcctgtccctttcactccacaccctttggccttctgccttgagctgggactgctttttgtttgtccggcctgcacccagcccctgcccacaaaaccccagggacagcggtctccccagcctgccctgctcaggccttgcccccaaacctgtactgtcccggaggaggttgggaggtggaggcccagcatcccgcgcagatgacaccggttttcctagaagcccctcacccccactggcccactggtggctaggtctccccttatccttttggtccagcgcaaggaggggctgcttctgaggtcggtggctgtctttccattaaagaaacaccgtgcaacgtg

SEQ ID NO: 260 - DNA, 1801 bp, Homo sapiens
ggtggagcctgttatgcgggcactccaggtccactccctcagggcagaggccacagcgccatccccttccccatggtctccctacccccaacctgcactgggcgctccgcccagaggtgagtccctcccagcccttctctccttctgtcctagccatccgcagagccatcctgtgcaaaggaaggagctaggctgtgcgccctgggcgtcatgatccttctgcgggcctccgaagtgcggcagctgcttcacaataagttcgtggtcatcctgggggactctgtgcatagggcagtatacaaggacctggtgcttctgctgcagaaggaccgcctgctcactcccgggcagcttagagcaaggggggagctgaacttcgaacaagatgagctggtggacggaggccagcggggccacatgcacaacggccttaactacccgtgagggtccgcgagttccgctccgaccaccatctggtacgtttttacttcctcacccgcgtgtactccgattacctccagaccatcttgaaagagctgcagtcgggcgagcacgcccccgacctggtcatcatgaattcctgcctctgggacatctccaggtatggtccgaactcctggagaagctacctggagaacctggagaacctgttccagtgcctgggccaggtgctgcccgagtcttgcctcctggtgtggaacacggccatgcctgtgggcgaggaagtcaccgggggttttcttccgcccaagctccggcggcagaaggccaccttcctgaaaaacgaagtggtcaaagccaacttccacagcgccaccgaggcacgtaaacataacttcgatgtactggacttgcatttccacttccgccacgcgagggagaacctgcactgggacggggtgcactggaatggacgtgtgcaccgctgcctctcccagctgctgctggcccacgtggccgacgcctggggtgtggagctgccccaccgccaccccgtgggcgagtggatcaagaagaaaaaacctggcccgagagtcgaagggccgccccaggccaacagaaatcacccggccttacctctgtccccacccttaccttcccccacataccgccccctgcttgggttcccaccccagcgcttgccgctgctcccgctcctgtccccacagcctcctcctcccattctccatcaccagggaatgccccggttcccacagggtcccccagatgcctgtttttcctcagaccatactttccagtcggatcaattctattgccattcagatgtcccctcatcagcccatgcaggtttcttcgtcgaagacaattttatggttggtcctcagctgcctatgcccttcttccccacaccccgttatcagcggcctgccccagtggtacataggggttttggcaggtatcgtccccgtggcccctatacgccctggggacagcggcctcgaccttcaaagagaagggccccagccaatcctgagccaaggcctcaatagacggacctaggccttatttcctctttatgaacatggattggacagatctgacacttcctttccattgcttggcctgaacagactgaccttgttaacttaagcctggagtccatgcctcgtcttccttttgttcattgctgttaccaagaaagccaaggaagagcagcctgactcattcttcttggctgcagcctcttccccacttcctgggagtgacccagcgttattcctgcctcctcactcctattctctttgcctttgtgtaaaaataaaatggaaataaacaagtt

SEQ ID NO: 261 - DNA, 1575 bp, Homo sapiens
cttctacaacgagctgcgcgtggccccggaggagcacccagtgctgctgaccgaggcccccctgaaccccaaggccaacagagagaagatgactcagattatgtttgagaccttcaacaccccggccatgtacgtggccatccaggccgtgctgtccctctacgcctctgggcgcaccactggcattgtcatggactctggagacggggtcacccacacggtgcccatctacgagggctacgccctcccccacgccatcctgcgtctggacctggctggccgggacctgaccgactacctcatgaagatcctcactgagcgaggctacagcttcaccaccacggccgagcgggaaatcgtgcgcgacatcaaggagaagctgtgctacgtcgccctggacttcgagcaggagatggccactgccgcatcctcctcttctctggagaagagctacgagctgcccgatggccaggtcatcaccattggcaatgagcggttccggtgtccggaggcgctgttccagccttccttcctgggtatggaatcttgcggcatccacgagaccaccttcaactccatcatgaagtgtgacgtggacatccgcaaagacctgtacgccaacacggtgctgtcgggcggcaccaccatgtatccgggcattgctgacaggatgcagaaggagatcaccgccctggcgcccagcaccatgaagatcaagatcatcgcacccccagagcgcaagtactcggtgtggatcggtggctccatcctggcctcactgtccaccttccagcagatgtggattagcaagcaggagtacgacgagtcgggcccctccatcgtccaccgcaaatgcttctaaacggactcagcagatgcgtagcatttgctgcatgggttaattgagaatagaaatttgcccctggcaaatgcacacacctcatgctagcctcacgaaactggaataagccttcgaaaagaaattgtccttgaagcttgtatctgatatcagcactggattgtagaacttgttgctgattttgaccttgtattgaagttaactgttccccttggtatttgtttaataccctgtacatatctttgagttcaacctttagtacgtgtggcttggtcacttcgtggctaaggtaagaacgtgcttgtggaagacaagtctgtggcttggtgagtctgtgtggccagcagcctctgatctgtgcagggtattaacgtgtcagggctgagtgttctgggatttctctagaggctggcaagaaccagttgttttgtcttgcgggtctgtcagggttggaaagtccaagccgtaggacccagtttcctttcttagctgatgtctttggccagaacaccgtgggctgttacttgctttgagttggaagcggtttgcatttacgcctgtaaatgtattcattcttaatttatgtaaggttttttttgtacgcaattctcgattctttgaagagatgacaacaaattttggttttctactgttatgtgagaacattaggccccagcaacacgtcattgtgtaaggaaaaataaaagtgctgccgt

SEQ ID NO: 262 - DNA, 1841 bp, Homo sapiens
cacggctgatgtggcgctggctgagttctttttggcttctttgaagtcagccatgatcaaaggctgtcgagaacctccctaccccagcatcctgacagatgccaccatggagaagctggcactggccaaatttgtggcccaagaatcgaagtgtgaggcatctgctgtcaccgtgcgcttctacggccttgtgcactgggaggaccccacagacgagtccctgggccccacgccctgccactgctcaccccccgagggcaccatcaccaaagaaggcatgctgcactacaaggcgggcacctcctacctgggcaaggaacactggaagacgtgcttcgtggtgctcagcaacgggatcctctaccagtacccggaccgcaccgacgtcatccctctgctctcggtgaacatggggggggagcagtgcggtggctgccggagagccaacaccacggatcggccccacgccttccaggtcattctctccgaccggccctgcctggagctaagtgccgagagcgaggccgagatggccgagtggatgcagcatctctgccaggctgtgtccaaaggggtcatcccccagggcgtagctcccagcccctgcataccctgctgcctggtcctcacggatgaccgcctctttacgtgccatgaggattgccagaccagcttcttccgctctttgggcacagccaagctgggcgacatcagcgccgtctccaccgagccgggcaaggagtactgcgtcttggagttctcccaggacagccagcagctcctcccgccctgggtcatctacctgagctgcacttctgaactggaccgattgctgtctgcactgaactctgggtggaaaaccatctatcaggtggacctcccccacacggcgatccaggaagcctccaacaagaagaaattcgaggatgccttgagcctcatccacagcgcctggcagcggagcgacagtctctgccgcggccgagcctcccgagacccctggtgctgaggcagagctggttggcgtccctggtgggcaggaaaggaaggcacgccagccggcaggcacactgtcacggctgttgtcatgctgtcgggagcctacagtccacccctgccctgggcggcagaaccaccgagtgtggcttaagacagggtccctccactccagggatccagatcaggtgcccggcacccctgggcatcctgcccgacaggtagcgaatggaggtcgctgggggcagagggtccgagccccgtgggctctgcggatgcacgccctcctcccgggcctccgcctcagtctgcagaatttctgccgagtggcaccgagaacaccatccatctaaggacgaacaaaagaaccaggagggcgggacccccctcttcctctcctgggttgggggctggggccctgagtgcccagccatccttgttcgtgtttgaacactctcctggccacgtggggaagcgggaacacggggtgtctgcgcatgtttcctcctcctagctccatcactgcgcacacagctgcctgcctcgccagatgcaggggggcgggcagccctccctggctgccaggaggctctgcatgcccacagtcctgccctgcctctcccctcaacccggcagtgcctgtagcaccgaggagcaaagggggtggatggggggcttggagaaggcggagcccaccagcctggcatccatgttgacatcttctgactgtcccctgcttggctggagccaggcccttccctagagtttcgtcaagagcctcctggggaaggggtcaggtggtttgggttttgttttttaaaataaaatagacatgttatattgcc

SEQ ID NO: 263 - DNA, 1907 bp, Homo sapiens
gtggaggtagaggtggttatggatatcctccagattattatggatatgaagattattatgattattatggttatgattaccataactatcgtggtggatatgaagatccatactatggttatgaagattttcaagttggagctagaggaaggggtggtagaggagcaaggggtgctgctccatccagaggtcgtggggctgctcctccccgcggtagagccggttattcacagagaggaggtcctggatcagcaagaggcgttcgaggtgcgagaggaggtgcccaacaacaaagaggccgcgggcagggaaaaggggtcgaggccggtcctgacctgttacaatgaagactgacttgctatgtgggattacaccagaagcttgcagtggagtaatggtaaggaaatcaagcaaccttaaatatgtcggctgtataggagcatattctattgcagaagaccttcctatgaagatcatggaatcaaatacgggacattgaactaatacttggactttgatatgaatttctttaacaattttctctgcagtgcaagttattaaactaaagctactctattttcaaaatgtgttccaacagaaatccttcataactcctagcatggtatcttaataaagaataaagttcttttaaaaatctgctctaagtagatttttccccttttttaaattaaggatcccaacagtggtattttgaaatattctcttgaatttgtgcatttaaattttattgcagtggtatagatgaatgccactgatggtatccttaaattttatttctgctcaccaaggttaatcatgattgtctatatcttttttatagtgatcacttttgaattgtgttcagatatgcagtttcaggtgtaatcatcagagctggttagtcaggcattccagatagtggttcttttcagaacctttttaaaagggttggttaactacctcagtagcagaggattgaactataccctgtctgtactgtacatagaaaatctttgtagataaaagcaaggcttgttaaatatgatatgagggtaagattttaatataccaaatgtaacattcttagttgcctttagtttcagaggcttgtaagacttcctcatgaccatcataacaggccttgcttttgtcgtattttgtggctgaaaaagcagccttgcttcttcagatattgtagttatttggatgtataatagtttagcaagatgttacttttgtaagacatcagatgttcaaaaaagtgcatccgaacttgtactaaatactgcagtgtccctttataaaaagtcagactaaaactgacaattgtacagcgaagcctgacatttggatattttgaagttttttcataaatcatagaaattagtatatggctgtagtttagctttttaggtaaaaggtatgtttcattagtgcatttcttcctgctgatcactgtaaacatgtgaatcagctttccatttcttatgcaggtcatgataacttgtagagtagagtacaatcatttgtgctatgtttttaattttctaaagcaccttgatgacagtgagtgtccagtggtgaagcatcctctattgaaccaccctcaaaaatttttttgccaagtcctaagttgatagcttaaagtaaaaagtgaaaattatagtttcattaggacttggtgtaaagaaatcccctccccccttccccaaagggatactgcagttatatcacatacccaataggcaccacgatgaagatcagagcttatacttaattaaggttttatacacaccagttccccagtaaatgcaaatttaacaagaaaatcagacatgtcatatgttcaaaatgctcatggcaaacaatcattttgcattcctgcaaataaaattgttttatactgt

SEQ ID NO: 264 - DNA, 697 bp, Homo sapiens
cagagctgtttatggcctcagctgcctcacttcctacaagagcagcctgtggcatctttgccttgggctgctcctcatggtgggttcaggggactcagccctgaggtgaaagggagctatcaggaacagctatgggagccccagggtcttccctacctcaggcaggaagggcaggaaggagagcctgctgcatggggtggggtagggctgactagaagggccagtcctgcctggccaggcagatctgtgccccatgcctgtccagcctgggcagccaggctgccaaggccagagtggcctggccaggagctcttcaggcctccctctctcttctgctccacccttggcctgtctcatccccaggggtcccagccaccccgggctctctgctgtacatatttgagactagtttttattccttgtgaagatgatatactatttttgttaagcgtgtctgtatttatgtgtgaggagctgctggcttgcagtgcgcgtgcacgtggagagctggtgcccggagattggacggcctgatgctccctcccctgccctggtccagggaagctggccgagggtcctggctcctgaggggcatctgcccctcccccaacccccaccccacacttgttccagctctttgaaatagtctgtgtgaaggtgaaagtgcagttcagtaataaactgtgtttactcagtg

SEQ ID NO: 265 - DNA, 1960 bp, Homo sapiens
ctcaggtggcaccaggtttcttgtgatcccagcgccctgcccacccttggagccaggcacacagtgacgactcggaggccaccagcctgtcctctgtggcctatgcctttctgcccgactcccacagctacaccatgcaggaattcgcccggcgttacttccggaggtcccaggccttgctgggccagactgatggaggtgccgcaggaaaggacacggacagcctggtgcagtacaccaaggctcccatccaggagtcgctcctcagcctcagtgatgatgtgagcaagctggctgtagccagcttcctggccctgatgcggtttatgggtgaccagtccaagccccggggcaaggatgagatggatctgctctatgaactgctgaagctgtgccagcaggagaagctgagggatgagatttactgccaggttatcaagcaggtcacgggacacccccggccggaacactgcactcgaggctggagcttcctcagccttctcacaggcttcttccccccgtcgaccaggctgatgccctacctgaccaagtttctgcaggattcaggccccagccaagagctggcccggagcagccaggagcacctccagcgcacagtcaaatatggggggcgccggcggatgcccccaccgggtgaaatgaaggctttcctgaaaggacaagcgattcgcctgcttcttattcacctgccggggggtgtggattataggacgaatatccagactttcacagtagcagcagaagtgcaggaggagctgtgccggcaaatgggtatcacggagcctcaggaagtgcaggaattcgccctcttcctcatcaaagagaagagccagctggtgcggcccctgcagcccgccgaatacctcaacagcgtggtagtggaccaggacgtgagcctgcacagccggcggctccactgggagaccccactgcacttcgataactccacctacatcagcacccactacagccaggtgctgtgggactaccttcaggggaagctgccagtcagcgccaaggcagacgcgcagctcgccaggctggccgccctgcagcacctcagcaaggccaacaggaataccccctcagggcaggacctgctagcttacgtgccaaagcagctgcaacggcaggtgaacacggcctccatcaagaacctgatgggtcaggagctgagacggctggaaggacacagcccccaggaagcacagatcagcttcattgaggccatgagccagctgcccctcttcggctacaccgtctatggggtgctgcgagtgagcatgcaggccctgtccggacccactctcctggggctcaaccgccagcatctcatcctcatggaccccagctcccagagcctgtactgccgcattgccctgaagagcctgcagcggctccacctgctaagccctctggaggagaaggggccccctggcctggaagtcaactatggctcagctgacaacccccagaccatctggtttgagctgccacaggcccaggagctgctatacaccactgtcttcctgatagacagcagtgcctcttgcactgagtggcccagcatcaactgagaggagtgcaggccggggagagaagaggatgaggcctcccccggcccaagtctcacccacatggtctgccttggatgctatcagatcactgttctagaacctgcctcagcacagcccagccggcccacatgcaggccatgaggcaggggctgctatcacgtcaccagcaggcaaagaaaacagccagaccctctccaggacggcctggggccaaagcgggctgcaggaactcggctggggcacctgaggttgcccagtctgagggagatgcccacccgaccccaggctccgcccaggccccacattagcacaagcccaggcatggagaaacagctgctgaggaaataaactcctgagggggg

SEQ ID NO: 266 - DNA, 977 bp, Homo sapiens
caagatcatcatggtgctgggcgccagggcggtgatcttgatcttcatggtgctgggcgccagggcggtgatctccttctgcatcctgtcggcaatgcccggatacatgaagatcaagatcatcgcacccccagagcgcaagtactcggtgtggatcggtggctccatcctggcctcactgtccaccttccagcagatgtggattagcaagcaggagtacgacgagtcgggcccctccatcgtccaccgcaaatgcttctaaacggactcagcagatgcgtacatttgctgcatgggttaattgagaatagaaatttgcccctggcaaatgcacacacctcatgctagcctcacgaaactggaataagccttcgaaaagaaattgtccttgaagcttgtatctgatatcagcactggattgtagaacttgttgctgattttgaccttgtattgaagttaactgttccccttggtatttgtttaataccctgtacatatctttgagttcaacctttagtacgtgtggcttggtcacttcgtggctaaggtaagaacgtgcttgtggaagacaagtctgtggcttggtgagtctgtgtggccagcagcctctgatctgtgcagggtattaacgtgtcagggctgagtgttctgggatttctctagaggctggcaagaaccagttgttttgtcttgcgggtctgtcagggttggaaagtccaagccgtaggacccagtttcctttcttagctgatgtctttggccagaacaccgtgggctgttacttgctttgagttggaagcggtttgcatttacgcctgtaaatgtattcattcttaatttatgtaaggttttttttgtacgcaattctcgattctttgaagagatgacaacaaattttggttttctactgttatgtgagaacattaggccccagcaacacgtcattgtgtaaggaaaaataaaagtgctgccgtact

SEQ ID NO: 267 - DNA, 2084 bp, Homo sapiens
tgcaatgagtggttccatggggactgcatccggatcactgagaagatggccaaggccatccgggagtggtactgtcgggagtgcagagagaaagaccccaagctagagattcgctatcggcacaagaagtcacgggagcgggatggcaatgagcgggacagcagtgagccccgggatgagggtggagggcgcaagaggcctgtccctgatccagacctgcagcgccgggcagggtcagggacaggggttggggccatgcttgctcggggctctgcttcgccccacaaatcctctccgcagcccttggtggccacacccagccagcatcaccagcagcagcagcagcagatcaaacggtcagcccgcatgtgtggtgagtgtgaggcatgtcggcgcactgaggactgtggtcactgtgatttctgtcgggacatgaagaagttcgggggccccaacaagatccggcagaagtgccggctgcgccagtgccagctgcgggcccgggaatcgtacaagtacttcccttcctcgctctcaccagtgacgccctcagagtccctgccaaggccccgccggccactgcccacccaacagcagccacagccatcacagaagttagggcgcatccgtgaagatgagggggcagtggcgtcatcaacagtcaaggagcctcctgaggctacagccacacctgagccactctcagatgaggacctacctctggatcctgacctgtatcaggacttctgtgcaggggcctttgatgaccatggcctgccctggatgagcgacacagaagagtccccattcctggaccccgcgctgcggaagagggcagtgaaagtgaagcatgtgaagcgtcgggagaagaagtctgagaagaagaaggaggagcgatacaagcggcatcggcagaagcagaagcacaaggataaatggaaacacccagagagggctgatgccaaggaccctgcgtcactgccccagtgcctggggcccggctgtgtgcgccccgcccagcccagctccaagtattgctcagatgactgtggcatgaagctggcagccaaccgcatctacgagatcctcccccagcgcatccagcagtggcagcagagcccttgcattgctgaagagcacggcaagaagctgctcgaacgcattcgccgagagcagcagagtgcccgcactcgccttcaggaaatggaacgccgattccatgagcttgaggccatcattctacgtgccaagcagcaggctgtgcgcgaggatgaggagagcaacgagggtgacagtgatgacacagacctgcagatcttctgtgtttcctgtgggcaccccatcaacccacgtgttgccttgcgccacatggagcgctgctacgccaagtatgagagccagacgtcctttgggtccatgtaccccacacgcattgaaggggccacacgactcttctgtgatgtgtataatcctcagagcaaaacatactgtaagcggctccaggtgttgtgcccgagcactcacgggaccccaaagtgccagctgacgaggtatgcgggtgcccccttgtacgtgatgtctttgagctcacgggtgacttctgccgcctgcccaagcgccagtgcaatcgccattactgctgggagaagctgcggcgtgcggaagtggacttggagcgcgtgcgtgtgtggtacaagctggacgagctgtttgagcaggagcgcaatgtgcgcacagccatgacaaaccgcgcgggattgctggccctgatgctgcaccagacgatccagcacgatcccctcactaccgacctgcgctccagtgccgaccgctgagcctcctggcccggaccccttacaccctgcattccagatgggggagccgcccggtgcccgtgtgtccgttcctccactcatctgtttctccggttctccctgtgcccatccaccggttgaccgcccatctgcctttatcagagggactgtccccgtcgacatgttcagtgcctggtggggctgcggggtccactcatccttgcctcctctccctgggttttgttatattaaaaattttggagagaaacc

SEQ ID NO: 268 - DNA, 2513 bp, Homo sapiens
cttccctcacggctcttctcccggtccctgaaactcggctgccaggggagctggagccacctgcgaaggtgtcctcccatactggacccctacaggaagctccgtgtgcccagctggggcacagccccagctgaggccccagaggggccacccatcgcaagaggggctttgggctctgccctccctccccatggcgcatgggccaaagcctgagactgaaggactgttggacctcagcttcctgacagaggaggagcaggaggccattgctggcgtcctccaacgagatgcccgcctgcgccagctggaggaggggcgggtcagcaaagctccgggcctcagtggcagaccctggcaagctgaagatcctgacacgggactggttccaggaagcacgctcccagcggcaccacaatgcccacttcggctctgaccttgtccgagcgtctatgcgcaggaagaagagcaccaggggagaccaggctccaggccacgacagggaggctgaggctgctgtgaaagagaaggaagaggggccagagcccaggctcaccattgatgaggcccctcaggagaggctcagggagactgagggacctgatttcccatcgccttctgtccccctaaaggcttcagatcctgaggaggcgtcccaggcccaggaagatcctggccaaggagaccaacaggtctgtgccgaggaggctgacccggagctggagcccgcgtcggggggagagcaggagccgcggccccagcaagcccaggtaggcgggagtggcccgtggctgctctcaacatccggagcggactccgggcggggagcgctcctgcccagggctgcgagccgcccgcgacccagggcgctcggggcaggggtggggaaagaaggggcgccccgtcacttgccccctctgcagaccaaggccgcgtcccagatcctggagaatggggaggaggccccggggcccgacccctctctcgaccgcatgctcagcagcagctcctcggtgtccagccttaactcctccacggtgaggcgggagggaggggacccgggcggccggggggtggacccgttccgatgcgtagcccctgcctgcccctccctcgccgcgggacccaccgctgcagccccccagcctgccacctatgacccgggtctgaagcctccgcgctgcccgcggcccgacgtgagccctgcgagcggcctgactcccacccactcccgtccgcagctgagcggcagccagatgagcctgtcaggcgacgcggaggcggtgcaggtccgcggctccgtgcacttcgcgctgcactacgagccgggcgccgccgagctgcgcgtgcacgtgatccagtgccagggcctggccgccgcccggcgccgccgctcggacccgtgagtgccccgccggccaagcggggcgcggctgtcacagcccagcccaccattcacagggtctcggcctcctcgtcctcatcttcaaaatgggaacaacagcgttattgggaggcgtgcgattaagcgagacaatccctgtaaagcgcttagcacgaggcctggcacgtgttcgggatggtggctgggggagcccacaggcaggggagaaggctctgggagggcccctcctcacctcgggttctcacctccccagctacgtcaaaagctacctcctcccggataagcagagcaagcgcaagacggcggtgaagaaacggaatctgaatccggttttcaacgagactctccggtactccgtcccgcaggccgagcttcagggccgcgtgctgagcctgtctgtgtggcaccgcgaaagcctgggtcgcaacatctttctgggcgaagttgaagtgcccctggacacgtgggactggggctctgagcccacctggctcccctgcagccccgggtcccaccctctcccgacgaccttccgagccgcgggttactcgccctgtccctcaagtacgtccccgccggctccgagggcgcaggactgcccccgagcggggagctgcacttctgggtgaaggaggctcgggacctcctgccgctgcgggcaggatccctggacacttacgtacaatgcttcgtgctgcctgatgacagccgggccagccgccagcgtacaagggttgtgcgacgcagcctcagccctgtgttcaatcacaccatggtgtacgatggctttgggcctgctgacctgcgccaggcttgtgccgagctctccctctgggaccatggggccctggccaaccgccagctggggggcacacgcctcagcctgggcaccggcagcagctatgggctgcaggtgccctggatggattccacacctgaggagaagcagctgtggcaagccctcctggagcagccgtgcgagtgggtggatggccttctacccctcagaaccaacctggcccccaggacgtagccccaccaagcctctctctctggacccccatctcagggcctgcccttggctaaagtcaataaagtctattctaagagc

SEQ ID NO: 269 - DNA, 1693 bp, Homo sapiens
gtggttacaggatcttcaagaagaaaatgaatctttaaaagcacatgttcaggaagtagcacaacataacttgaaagaggcctcttctgcatcacagtttgaagaacttgagattgtgttgaaagaaaaggaaaatgaattgaagaggttagaagccatgctaaaagagagggagagtgatctttctagcaataacacagctgttacaggatgtacaagatgaaaacaaattgtttaagtcccaaattgagcagcggaaacaacaaaactaccaacaggcatcttcttttcccctcatgaagaattattaaaagtaatttcagaaagagagaaagaaataagtggtctctggaatgagttagattctttgaaggatgcagttgaacaccagaggaagaaaaacaatgaaaggcagcaacaggtggaagctgttgagttggaggctaaagaagttctcaaaaaattatttccaaaggtgtctgtcccttctaatttgagttatggtgaatggttgcatggatttgaaaaaaaggcaaaagaatgtatggctggaacttcagggtcagaggaggttaaggttctagagcacaagttgaaagaagctgatgaaatgcacacattgttacagctagagtgtgaaaaatacaaatccgtccttgcagaaacagaaggaattttacagaagctacagagaagtgttgagcaagaagaaaataaatggaaagttaaggtcgatgaatcacacaagactattaaacagatgcagtcatcatttacatcttcagaacaagagctagagcgattaagaagcgaaaataaggatattgaaaatctgagaagagaacgagaacatttggaaatggaactagaaaaggcagagatggaacgatctacctatgttacagaagtcagagagttgaaggcacagttaaatgaaacactcacaaaacttagaactgaacaaaatgaaagacagaaggtagctggtgatttgcataaggctcaacagtcactggagcttatccagtcaaaaatagtaaaagctgctggagacactactgttattgaaaatagtgatgtttccccagaaacggagtcttctgagaaggagacaatgtctgtaagtctaaatcagactgtaacacagttacagcagttgcttcaggcggtaaaccaacagctcacaaaggagaaagagcactaccaggtgttagagtgaagtaattgggaaactgttcatttgaggataaaaaaggcattgtattatattttgccaaattaaagccttatttatgttttcaccctttctactttgtcagaaacactgaacagagttttgtcttttctaatccttgttagactactgatttaaagaaggaaaaaaaaaagccaactctgtagacaccttcagagtttagttttataataaaaactgtttgaataattagacctttacattcctgaagataaacatgtaatcttttatcttattttgctcaataaaattgttcagaagatcaaagtggtaaagacaatgtaaaatttaacattttaatactgatgttgtacactgttttacttaacattttgggaagtaactgcctctgacttcaactcaagaaaacacttttttgttgctaatgtaatcggtttttgtaatggcgtcagcaaataaaaggatgcttattattcc

SEQ ID NO: 270 - DNA, 2149 bp, Homo sapiens
accgctgccagttctgccgcttccagaagtgcctggcggtgggcatggtgaaggaaggtgtgtggctggggtgcggcccagcggggcaagggtaggcttgagtggagtgggaccagcagggcccccaggcttctgccctggaggacccagaggagggcatgtcttatttccaccccacctctgaaccccaggccttggagggaggcagcctacacctgcctggattgtgagggtggtggcagggggaggttcctatagggtaccttggatctcagggactctgggtcctagggactcggtggggcgcgtctcagcagtggtgtgcacggcttgggctgagaggcccttcctcagatcccttccttcctcacccctacccattcctttgcagttgtccgaacagacagcctgaaggggcggcggggccggctaccttcaaaacccaagcagcccccagatgcctcccctgccaatctcctcacttccctggtccgtgcacacctggactcagggcccagcactgccaaactggactactccaaggtgaggtcccaccccgtgtctgccttggggaggtctatgagcacatgcagtgcctttgtgcgtgttaggagagctaccccctctggaaggactgaatgagaaaggaggtttaaaaaagaaagaaagaaaagcgactccctccagttcgacagatcaaagagaggatccccctctcggctgaccagatgggaaaatgcaccccctcaggcaggtggccaattagaaaaatatgtccttttggcagctgcagccctgggttaatatgtgagacttggcaagtgagagcctgggcaggatctcagatccactcccactcccgggatctggcatccaagtgtctgacacagccatacgtggcagtgggtgtaggagcctgcctggggtgctgaccccactggaccgtcttcctagttccaggagctggtgctgccccactttgggaaggaagatgctggggatgtacagcagttctacgacctgctctccggttctctggaggtcatccgcaagtgggcggagaagatccctggctttgctgagctgtcaccggctgaccaggacctgttgctggagtcggccttcctggagctcttcatcctccgcctggcgtacaggtctaagccaggcgagggcaagctcatcttctgctcaggcctggtgctacaccggctgcagtgtgcccgtggcttcggggactggattgacagtatcctggccttctcaaggtccctgcacagcttgcttgtcgatgtccctgccttcgcctgcctctctgcccttgtcctcatcaccgaccggcatgggctgcaggagccgcggcgggtggaggagctgcagaaccgcatcgccagctgcctgaaggagcacgtggcagctgtggcgggcgagccccagccagccagctgcctgtcacgtctgttgggcaaactgcccgagctgcggaccctgtgcacccagggcctgcagcgcatcttctacctcaagctggaggacttggtgccccctccacccatcattgacaagatcttcatggacacgctgcccttctgacccctgcctgggaacacgtgtgcacatgcgcactctcatatgccaccccatgtgcctttagtccacggacccccagagcacccccaagcctgggcttgagctgcagaattactccaccttctcacctgctccaggaggtttcagggagctcaagcccttggggagggggatgccttcatgggggtgaccccacgatttgtcttatcccccccagcctggccccggcctttatgttttttgtaagataaaccgtttttaacacatagcgccgtgctgtaaataagcccagtgctgctgtaaatacaggaagaaagagcttgaggtgggagcggggctgggaggaagggatgggccccgccttcctgggcagcctttccagcctcctgctggctctctcttcctaccctccttccacatgtacataaactgtcactctaggaagaagacaaatgacagattctgacatttatatttgtgtattttcctggatttatagtatgtgacttttctgattaatatatttaatatattgaataaaaaatagacatgtagttgg

SEQ ID NO: 271 - DNA, 1812 bp, Homo sapiens
ctaagacatgggaaaaagccttgacttttgggactgcttctcttccataagaattttcagtagataaaattttaaaagtgctgcaccttccctgagtgaaaattccctgaggatgcatggttagcatttcagttctaattaaggcagactggatcctggctaactggagtcatggggtatactttcattcatgagtggaacagcagtgtcttagcagcactacatctgcaatgttcattgtgaagtggagtcaggacctcgttggaagacttcgttctgcgtcatgccaactgcattttatggtgataacattctccaaatagcacctctacaatcatttttcagtcgttacccttttaactcagcaggaaaggctattacagatacttctttaaatcagtgtttattgacagggaaaagcaccagcaatacacacttaaccaaatccttgcaaatgtcatctattaaatatcttcatccttattagtctgttttactttgaatatcttctgagtgaaattgagtgcattcccatatcttttcaccaattatatttgttttcctatgacccaatttgttcatttttctattcaatgaaccctctccccagagagttccgcatgtgccaatttttctactcaattatttacctgttttgcattaaacttataatatcttttttaaaaattaaccctttatcataagtgctgcaaacacttagttgaagtttgccatatcttttgactttgtaaaaacttttggcatatgagttgtatatttcatgtagtcaaagagtaatcttttcctttatggattccaatttttaaatggtttatatttttagctaaattttcaggagtgaaaagaaaaagaggaaggaagaaacccctctcaggcaatcatgtacagccacccgaaacaatgaaatgtaatacattcataagacaagtgaaagaagagcatggcagacacacagatgcaactgtgaaagttccttttcttaagaaatgcaaggaagcaggacttcttaattacttacttgaagaaatattagacaaagttcattcaattccagaaaaactcatggatgagactacttcagaatcagacccaagcacttcccaaacagtgtgcctgagaaccacctgtagggctggtgaggacacagatagctgggcctatcccacagagattctgattcagtacaaataccaagaattgggggccaggcgcggtggctcacgcctgtaatcccagcacttttgggagcccgagactatgaagaaatcgggagtgcactttttgactgtagattgttcgaagacacatttgtaaattttcatgcagcaatagagaaaaaaattcatgcatctcaacaaaggtggcagcagttgaaggatgagattgagctacttcaggacttaaaacaaaccttgtgctcttttcaagaaaatagagatcttatgtcaagttctacatcaatatcatccgtgtcttattagggattaccatttcctaagccaagagtcatgtcaaattgcaatcaggctcaaaaccagagaccaggctgtgaaatccacacatctttagaactagtcgtctcctcttggcctcagcagctcttccctgttcttactggttgacattttgatcactctttgcacactcttgtgttttttgctcactgtcacactcccagcacctagtatgctcagtaaatgtttgtggaataagtgcataaaatgttcttaacctttgattctacttacagcccatgatagcctcttagatataataaatttggattatact

SEQ ID NO: 272 - DNA, 1831 bp, Homo sapiens
aaatttaagttttgagattaagaaggtccctctccaagagggaccaaaaagttttgatgggaacacacttttgaataggggacatgcaattaaaattaaatctgcttcaccttgtatagctgataaaatctctaagccacaggaattaagttcagatctaaatgtcggtgatacttcccagaattcttgtgtggactgcagtgtaacacaatcaaacaaagtttcagttactccaccagaagaatcccagaattcagacacacctccaaggccagaccgcttgcctcttgatgagaaaggacatgtaacgtggtcatttcatggacctgaaaatgccatacccatacctgatttatctgaaggcaattcctcagatatcaactatcaaactaggaaaactgtgagtttaacaccaagtcctacaacacaagttgaaacacctgatcttgtggatcatgataacacttcaccactcttcagaacacccctcagttttactaatccacttcactctgatgactcagactcagatgaaagaaactctgatggtgctgtgacccagaataaaactaatatttcaacagcaagtgccacagtttctgctgccactagtactgaaagcatttctactaggaaagtattgccaatgtccattgctagacataatatagcaggaacaacacattcaggtgctgaaaaagatgttgatgttagtgaagattcacctcctcccctacctgaaagaactcctgaatcgtttgtgttagcaagtgaacataatacacctgtaagatcggaatggagtgaacttcaaagtcaggaacgatctgaacaaaaaaagtctgaaggcttgataacctctgaaaatgagaaatgtgatcatccagcgggaggtattcactatgaaatgtgcatagaatgtccacctactttcagtgacaagagagaacaaatatcagaaaatccaacagaagccacagatattggttttggtaatcgatgtggaaaacccaaaggaccaagagatccaccttcagaatggacatgattcagggagctagaagacactttaagttatactggaaaattcaggtgccactgaaagccagatttatagtattccatctttaatatgtgggactaacagcagtgtagattgttaccttaatattttttgctgggaccatctacctgccttatactacacttaggaaaaagtattacatatggtttattttgaaacttcaagtattattgccttaatgtctcttaaccctgttacacgctgcttgtagacatgttaatatagtaatacctttatgatatattgagtttaaggactactctttttctgttttatcatgtatgcattattttgtatatgtacagggcaagtaggtatataatttgataaagttgcaattgaaatattattaacagaagatgtaagaaatttctgcatggtctaaatctttgtgtactttatttgtaaattatttgccctggagttttagaaaatagtttctgaattttaaacttgctggattcatgcagccagctttgcaggttatcagagatcaaagattgtaataataattttgtaaattgtaagcaaaaagttatttttatattatatacagtctaattgttcatcctaattgttcctgttttcatctagtcagagattcagtaagtgccttggaacaatattgaattctcttagcttgtgtgtgtttctttaatatttgaactcaagtgggattagaagactatcaaaatacatgtatgtttcaggatatttgacctgtcattaaaaaaaacaaacagtttt

SEQ ID NO: 273 - DNA, 1542 bp, Homo sapiens
caaggctgccccatctggcgctgattatcctgctgctgccgccaccgctgctgctgctctgcaaaattcagctgctgcctctgtcttgaggaccccagcgcctttcccccggggccatgctgcctgcagccacagcctccctcctggggcccctcctcactgcctgcgccctgctgccttttgcccagggccagacccccaactacaccagacccgtgttcctgtgcggaggggatgtgaagggggaatcaggttacgtggcaagtgaggggttccccaacctctacccccctaataaggagtgcatctggaccataacggtccccgagggccagactgtgtccctctcattccgagtcttcgacctggagctgcaccccgcctgccgctacgatgctctggaggtcttcgctgggtctgggacttccggcagcggctcggacgcttttgtgggaccttccggcctgcgcccctagtcgcccccggcaaccaggtgaccctgaggatgacgacggatgagggcacaggaggacgaggcttcctgctctggtacagcgggcgggccacctcgggcactgagcaccaattttgcggggggcggctggagaaggcccagggaaccctgaccacgcccaactggcccgagtccgattaccccccgggcatcagctgttcctggcacatcatcgcgcccccggaccaggtcatcgcgctgaccttcgagaagtttgacctggagccggacacctactgccgctatgactcggtcagcgtgttcaacggagccgtgagcgacgactcccggaggctggggaagttctgcggcgacgcagtcccgggctccatctcctccgaagggaatgaactcctcgtccagttcgtctcagatctcagtgtcaccgctgatggcttctcagcctcctacaagacccttgcgcggggcactgccaaagaagggcaagggcccggccccaaacggggaactgagcctaaagtcaagctgccccccaagtcccaacctccggagaaaacagaggaatctccttcagcccctgatgcacccacctgcccaaagcagtgccgccggacaggcaccttgcagagcaacttctgtgccagcagccctgtggtgactgcgacagtgaagtccatggttcgggagccaggggagggccttgccgtgactgtcagtcttattggtgcttataaaactggagggctggacctgccttctccacccactggtgcctccctgaagttttacgtgccttgcaagcagtgcccccccatgaagaaaggagtcagttatctgctgatgggccaggtagaagagaacagaggccccgtccttcctccagagagctttgtggttctccaccggcccaaccaggaccagatcctccccaacctaagcaagaggaagtgcccctctcaacctgtgcgggctgctgcgtcccaggactgagacgcaggccagccccggcccctagccctcaggccttctttcttatccaaataaatgtttcttaatgaggaatgggg

SEQ ID NO: 274 - DNA, 2085 bp, Homo sapiens
gaatggaggagtcggaacccgaacggaagcgggctcgcaccgacgaggtgcctgccggaggaagccgctccgaggcggaagatgaggacgacgaggactacgtgccctatgtgccgttacggcagcgccggcagctactgctccagaagctgctgcagcgaagacgcaagggagctgcggaggaagagcagcaggacagcggtagtgaaccccggggagatgaggacgacatcccgctaggccctcagtccaacgtcagcctcctggatcagcaccagcaccttaaagagaaggctgaagcgcgcaaagagtctgccaaggagaagcagctgaaggaagaagagaagatcctggagagtgttgccgagggccgagcattgatgtcagtgaaggagatggctaagggcattacgtatgatgaccccatcaaaaccagctggactccaccccgttatgttctgagcatgtctgaagagcgacatgagcgcgtgcggaagaaataccacatcctggtggagggagacggtatcccaccacccatcaagagcttcaaggaaatgaagtttcctgcagccatcctgagaggcctgaagaagaaaggcattcaccacccaacacccattcagatccagggcatccccaccattctatctggccgtgacatgataggcatcgctttcacgggttcaggcaagacactggtgttcacgttgcccgtcatcatgttctgcctggaacaagagaagaggttacccttctcaaagcgcgaggggccctatggactcatcatctgcccctcgcgggagctggcccggcagacccatggcatcctggagtactactgccgcctgctgcaggaggacagctcaccactcctgcgctgcgccctctgcattgggggcatgtccgtgaaagagcagatggagaccatccgacacggtgtacacatgatggtggccaccccggggcgcctcatggatttgctgcagaagaagatggtcagcctagacatctgtcgctacctggccctggacgaggctgaccgcatgatcgacatgggcttcgagggtgacatccgtaccatcttctcctacttcaagggccagcgacagaccctgctcttcagtgccaccatgccgaagaagattcagaactttgctaagagtgcccttgtaaagcctgtgaccatcaatgtggggcgcgctggggctgccagcctggatgtcatccaggaggtagaatatgtgaaggaggaggccaagatggtgtacctgctcgagtgcctgcagaagacacccccgcctgtactcatctttgcagagaagaaggcagacgtggacgccatccacgagtacctgctgctcaagggggttgaggccgtagccatccatgggggcaaagaccaggaggaacggactaaggccatcgaggcattccgggagggcaagaaggatgtcctagtagccacagacgttgcctccaagggcctggacttccctgccatccagcacgtcatcaattatgacatgccagaggagattgagaactatgtacaccggattggccgcaccgggcgctcgggaaacacaggcatcgccactaccttcatcaacaaagcgtgtgatgagtcagtgctgatggacctcaaagcgctgctgctagaagccaagcagaaggtgccgcccgtgctgcaggtgctgcattgcggggatgagtccatgctggacattggaggagagcgcggctgtgccttctgcgggggcctgggtcatcggatcactgactgccccaaactcgaggctatgcagaccaagcaggtcagcaacatcggtcgcaaggactacctggcccacagctccatggacttctgagccgacagtcttcccttctctccaagaggcctcagtccccaagactgccaccagtctacacatacagcagccccctggacagaatcagcatttcagctcagctggcctggaatgggccaggctggtcctggctgcctgttccctgtgctcttcagaattactgtttttgtttccttttaccccagctgccattaaagcccaaacttttagcccc

SEQ ID NO: 275 - DNA, 2507 bp, Homo sapiens
acaaagtggattcaaagattgcagaacagaggttcgggatcaacatcccacacaagttcagcatccacaactacaaagtgccaacattctgcgatcactgtggctcactgctctggggaataatgcgacaaggacttcagtgtaaaatatgtaaaatgaatgtgcatattcgatgtcaagcgaacgtggcccctaactgtggggtaaatgcggtggaacttgccaagaccctggcagggatgggtctccaacccggaaatatttctccaacctcgaaactcgtttccagatcgaccctaagacgacagggaaaggagagcagcaaagaaggaaatgggattggggttaattcttccaaccgacttggtatcgacaactttgagttcatccgagtgttggggaaggggagttttgggaaggtgatgcttgcaagagtaaaagaaacaggagacctctatgctgtgaaggtgctgaagaaggacgtgattctgcaggatgatgatgtggaatgcaccatgaccgagaaaggatcctgtctctggcccgcaatcaccccttcctcactcagttgttctgctgctttcagacccccgatcgtctgttttttgtgatggagtttgtgaatgggggtgacttgatgttccacattcagaagtctcgtcgttttgatgaagcacgagctcgcttctatgctgcagaaatcatttcggctctcatgttcctccatgataaaggaatcatctatagagatctgaaactggacaatgtcctgttggaccacgagggtcactgtaaactggcagacttcggaatgtgcaaggaggggatttgcaatggtgtcaccacggccacattctgtggcacgccagactatatcgctccagagatcctccaggaaatgctgtacgggcctgcagtagactggtgggcaatgggcgtgttgctctatgagatgctctgtggtcacgcgccttttgaggcagagaatgaagatgacctctttgaggccatactgaatgatgaggtggtctaccctacctggctccatgaagatgccacagggatcctaaaatctttcatgaccaagaaccccaccatgcgcttgggcagcctgactcagggaggcgagcacgccatcttgagacatcctttttttaaggaaatcgactgggcccagctgaaccatcgccaaatagaaccgcctttcagacccagaatcaaatcccgagaagatgtcagtaattttgaccctgacttcataaaggaagagccagttttaactccaattgatgagggacatcttccaatgattaaccaggatgagtttagaaacttttcctatgtgtctccagaattgcaaccatagccttatggggagtgagagagagggcacgagaacccaaagggaatagagattctccaggaatttcctctatgggaccttcccagcatcagccttagaacaagaaccttaccttcaaggagcaagtgaagaactctgtgaaggatggaactttcagatatcaactatttagagtccagagggagccatggcactagaaatagttgataatgaaatgagattttatgaagtataccgctccacctatgagcgtctgtctctgtgggcttgggatgttaacaggagccaaaaggagggaaagtgtgaagaataaagtagatctgagaaattctgagccaatcaggcttcttaattcaagagacaaaccaagacgttctgtcaactgtgctgtgctcttctttaagccaatgaaccccaattcctggcagtctacaagaagtctcttaatgctaatgaagaatttaaaggtctttttaaggaaatgaagggctttccaaatagaatgatttactctgaagaaacaaacaatggtatctctgaaactcacaacctaaagcccaatcttgaaaatatgttgtgcaccaagacgactgcttcagcttcttctcttatccttactttctttaatagatatttattaaactgtccagtgaaaaggtgccacaatgcccagtattgtaaacaacaggtttgcattcatgaagctttcattcattctggagtctactaatttacctgaatggtgtttgcattctgtgaaatgcctctccacgttgcatatgtcacacttttgtctgcacataactcttttttcacaagaagggtcactgccacaacagcacagtcagcgggtgaattacaggtgcctgctgcctgcctacctgggtaatctgatcttgtctgtatcgccgtgtgctcatcactgaagaattgcaggccactcatgtcagtgaccagatttgtggcttataaacattagcagtttatttatgttttaagatgcaaagatgtgtgtttgatattcactttaataattagaaatggatcttgtaaacagggcatatatcaaagatgaccttataatatgtacccgaatatacagttcaagaattttgtctgactggaaataaatgcattttgtagc

SEQ ID NO: 276 - DNA, 2824 bp, Homo sapiens
cccgctcagcccggaccctcggtggcagagctccagtccccgccccgtggccctcgccctgcagcaggccctgggccaggagctggcccgcgtcgtccagggcagccccgaggtgccgggcatcacggtgcgtgtcctgcaggccctcgccaccctgctcagctccccacacggcggtgccctggtgatgtccatgcaccgtagccacttcctggcctgcccgctgctgcgccagctctgccagtaccagcgctgtgtgccacaggacaccggcttctcctcgctcttcctgaaggtgctcctgcagatgctgcagtggctggacagccctggcgtggagggcgggcccctgcgggcacagctcaggatgcttgccagccaggcctcagccgggcgcaggctcagtgatgtgcgaggggggctcctgcgcctggccgaggccctggccttccgtcaggacctggaggtggtcagctccaccgtccgtgccgtcatcgccaccctgaggtctggggagcagtgcagcgtggagccggacctgatcagcaaagtcctccaggggctgatcgaggtgaggtccccccacctggaggagctgctgactgcattcttctctgccactgcggatgctgcctccccgtttccagcctgtaagcccgttgtggtggtgagctccctgctgctgcaggaggaggagcccctggctggggggaagccgggtgcggacggtggcagcctggaggccgtgcggctggggccctcgtcaggcctcctagtggactggctggaaatgctggaccccgaggtggtcagcagctgccccgacctgcagctcaggctgctcttctcccggaggaagggcaaaggtcaggcccaggtgccctcgttccgtccctacctcctgaccctcttcacgcatcagtccagctggcccacactgcaccagtgcatccgagtcctgctgggcaagagccgggaacagaggttcgacccctctgcctctctggacttcctctgggcctgcatccatgttcctcgcatctggcaggggcgggaccagcgcaccccgcagaagcggcgggaggagctggtgctgcgggtccagggcccggagctcatcagcctggtggagctgatcctggccgaggcggagacgcggagccaggacggggacacagccgcctgcagcctcatccaggcccggctgcccctgctgctcaactgctgctgtggggacgatgagagtgtcaggaaggtgacggagcacctgtcaggctgcatccagcagtggggagacagcgtgctgggcaggcgctgccgagaccttctcctgcagctctacctacagcggccggagctgcgggtgcccgtgcctgaggtcctactgcacagcgaaggggctgccagcagcagcgtctgcaagctggacggactcatccaccgcttcatcacgctccttgcggacaccagcgactcccgggcgttggagaaccgaggggcggatgccagcatggcctgccggaagctggcggtggcgcacccgctgctgctgctcaggcacctgcccatgatcgcggcgctcctgcacggccgcacccacctcaacttccaggagttccggcagcagaaccacctgagctgcttcctgcacgtgctgggcctgctggagctgctgcagccgcacgtgttccgcagcgagcaccagggggcgctgtgggactgccttctgtccttcatccgcctgctgctgaattacaggaagtcctcccgccatctggctgccttcatcaacaagtttgtgcagttcatccataagtacattacctacaatgccccagcagccatctccttcctgcagaagcacgccgacccgctccacgacctgtccttcgacaacagtgacctggtgatgctgaaatccctccttgcagggctcagcctgcccagcagggacgacaggaccgaccgaggcctggacgaagagggcgaggaggagagctcagccggctccttgcccctggtcagcgtctccctgttcacccctctgaccgcggccgagatggccccctacatgaaacggctttcccggggccaaacggtggagggtgagtcaggccctgcttcacccacgccagatctgctggaggttctgagtgacatagacgagatgtcccggcggagacccgagatcctgagcttcttctcgaccaacctgcagcggctgatgagctcggccgaggagtgttgccgcaacctcgccttcagcctggccctgcgctccatgcagaacagccccagcattgcagccgctttcctgcccacgttcatgtactgcctgggcagccaggactttgaggtggtgcagacggccctccggaacctgcctgagtacgctctcctgtgccaagagcacgcggctgtgctgctccaccgggccttcctggtgggcatgtacggccagatggaccccagcgcgcagatctccgaggccctgaggatcctgcatatggaggccgtgatgtgagcctgtggcagccgacccccctccaagccccggcccgtcccgtccccggggatcctcgaggcaaagcccaggaagcgtgggcgttgctggtctgtccgaggaggtgagggcgccgagccctgaggccaggcaggcccaggagcaatactccgagccctggggtggctccgggccggccgctggcatcaggggccgtccagcaagccctcattcaccttctgggccacagccctgccgcggagcggcggatccccccgggcatggcctgggctggttttgaatgaaacgacctgaactgtc

SEQ ID NO: 277 - DNA, 1829 bp, Homo sapiens
ctgagccgccgacggggcgggtgggctttgctgccgagcaggcggcgccgtcttggggcctagcggcgaggcgacccgcacagtactgtaagattgatgttaaaggcatggtgttcaccccacttcatcagcgtacataagttatctcttcttttggacccttattttatgccataatgtatgtcattgaaagtgcccgacagagacctcctaaaaggaaatacctatcaagtggaagaaaatctgtatttcaaaaactttatgacttgtatattgaagaatgtgaaaaagaacctgaagttaagaaattaagaagaaatgtgaacttgttagagaagcttgttatgcaagagactttgtcatgtttagtggtcaatctatacccaggaaatgagggatattctctgatgctcaggggaaaaaacggatcagattccgagaccattcgactgccctatgaagaaggagagttgcttgaatatttggatgcagaagaattacctcctattttggttgatctcctagaaaaatctcaggttaatatttttcattgcggatgtgtcatagcagaaatacgtgactacaggcagtccagtaacatgaaatctcctggttaccaaagtcggcacattctcttacgtccaacaatgcagactttaatttgtgatgtacattcaataacaagtgataaccacaaatggacccaggaagacaaacttttgcttgagagccagctcatcctagctacagctgaaccactctgtcttgatccttctatagcagtcacctgcactgcaaacagactgctctataacaagcaaaagatgaacactcgcccaatgaaacggtgtttcaagaggtattccagatcctctctgaatcggcagcaagatctatctcattgtccacctcctcctcagctgaggttacttgatttcttacaaaaaagaaaggaaagaaaagcaggtcagcattatgacctcaaaatttctaaggcaggaaattgtgtagatatgtggaaacggagtccctgtaatttggccataccttctgaagtagatgtggagaaatatgctaaagtggaaaagtctatcaaatctgatgactcacagccaacagtctggccagcccatgatgtaaaagatgattatgtatttgaatgtgaagctggtactcagtatcagaaaacaaagctgaccatcttgcagtcgcttggagatccactttactatggtaaaatacagccatgtaaagcagatgaagaaagtgacagccagatgtctccatcacactcgtccacagatgatcattcaaattggttcattattggatcaaagaccgatgctgagagggtagtcaatcagtaccaagaattagtccagaatgaagccaaatgtccggtcaagatgtcacacagctccagtggctcagccagtctgagtcaggtttctccagggaaagaaacagatgtgtgtttcattaatgttacttctttgtgcccagttgtttcacaagtaatctgagaaatgttaagaatcatttttggaggctaggcacagtggctcatgcctgtaatcccaacactttgggaggccaaggtgggtggatcacctgaggtcgggagttcgagaccagcctgaccaatagtgtgaaaccccatctctactaaaaacacaaaaattagctgggcatggtggcacacacctgtaatcccagccactcgggaggctgagacaggagaatctcttgaaccccggaggtggaggtttcagtgagccgagatagcgccactgcactccagcctgggcaacagagcaagactccatctc

SEQ ID NO: 278 - DNA, 2470 bp, Homo sapiens
ggcctgagccctgcccaggtgcccgcagagagcagccgggctgccagcgtttcatgatcaacatgggagactcccacgtggacaccagctccaccgtgtccgaggcggtggccgaagaagtatctcttttcagcatgacggacatgattctgttttcgctcatcgtgggtctcctaacctactggttcctcttcagaaagaaaaaagaagaagtccccgagttcaccaaaattcagacattgacctcctctgtcagagagagcagctttgtggaaaagatgaagaaaacggggaggaacatcatcgtgttctacggctcccagacggggactgcagaggagtttgccaaccgcctgtccaaggacgcccaccgctacgggatgcgaggcatgtcagcggaccctgaggagtatgacctggccgacctgagcagcctgccggagatcgacaacgccctggtggttttctgcatggccacctacggtgagggagaccccaccggacaatgcccaggacttctacgactggctgcaggagacagacgtggatctctctggggtcaagttcgcggtgtttggtcttgggaacaagacctacgagcacttcaatgccatgggcaagtacgtggacaagcggctggagcagctcggcgcccagcgcatctttgagctggggttgggcgacgacgatgggaacttggaggaggacttcatcacctggcgagagcagttctggccggccgtgtgtgaacactttggggtggaagccactggcgaggagtccagcattcgccagtacgagcttgtggtccacaccgacatagatgcggccaaggtgtacatgggggagatgggccggctgaagagctacgagaaccagaagcccccctttgatgccaagaatccgttcctggctgcagtcaccaccaaccggaagctgaaccagggaaccgagcgccacctcatgcacctggaattggacatctcggactccaaaatcaggtatgaatctggggaccacgtggctgtgtacccagccaacgactctgctctcgtcaaccagctgggcaaaatcctgggtgccgacctggacgtcgtcatgtccctgaacaacctggatgaggagtccaacaagaagcacccattcccgtgccctacgtcctaccgcacggccctcacctactacctggacatcaccaacccgccgcgtaccaacgtgctgtacgagctggcgcagtacgcctcggagccctcggagcaggagctgctgcgcaagatggcctcctcctccggcgagggcaaggagctgtacctgagctgggtggtggaggcccggaggcacatcctggccatcctgcaggactgcccgtccctgcggccccccatcgaccacctgtgtgagctgctgccgcgcctgcaggcccgctactactccatcgcctcatcctccaaggtccaccccaactctgtgcacatctgtgcggtggttgtggagtacgagaccaaggccggccgcatcaacaagggcgtggccaccaactggctgcgggccaaggagcctgccggggagaacggcggccgtgcgctggtgcccatgttcgtgcgcaagtcccagttccgcctgcccttcaaggccaccacgcctgtcatcatggtgggccccggcaccggggtggcacccttcataggcttcatccaggagcgggcctggctgcgacagcagggcaaggaggtgggggagacgctgctgtactacggctgccgccgctcggatgaggactacctgtaccgggaggagctggcgcagttccacagggacggtgcgctcacccagctcaacgtggccttctcccgggagcagtcccacaaggtctacgtccagcacctgctaaagcaagaccgagagcacctgtggaagttgatcgaaggcggtgcccacatctacgtctgtggggatgcacggaacatggccagggatgtgcagaacaccttctacgacatcgtggctgagctcggggccatggagcacgcgcaggcggtggactacatcaagaaactgatgaccaagggccgctactccctggacgtgtggagctaggggcctgcctgccccacccaccccacagactccggcctgtaatcagctctcctggctccctcccgtagtctcctgggtgtgtttggcttggccttggcatgggcgcaggcccagtgacaaagactcctctgggcctggggtgcatcctcctcagcccccaggccaggtgaggtccaccggcccctggcagcacagcccagggcctgcatgggggcaccgggctccatgcctctggaggcctctggccctcggtggctgcacagaagggctctttctctctgctgagctgggcccagcccctccacgtgatttccagtgagtgtaaataattttaaataacctctggcccttggaataaagttctgttttctgt

SEQ ID NO: 279 - DNA, 2057 bp, Homo sapiens
gggaccttgtcactaaagcagagaagccacttcttctgggcccacgaggcagctgtcccatgctctgctgagcacggtggtgccatgcctctgcaactcctcctgttgctgatcctactgggccctggcaacagcttgcagctgtgggacacctgggcagatgaagccgagaaagccttgggtcccctgcttgcccgggaccggagacaggccaccgaatatgagtacctagattatgatttcctgccagaaacggagcctccagaaatgctgaggaacagcactgacaccactcctctgactgggcctggaacccctgagtctaccactgtggagcctgctgcaaggcgttctactggcctggatgcaggaggggcagtcacagagctgaccacggagctggccaacatggggaacctgtccacggattcagcagctatggagatacagaccactcaaccagcagccacggaggcacagaccactcaaccagtgcccacggaggcacagaccactccactggcagccacagaggcacagacaactcgactgacggccacggaggcacagaccactccactggcagccacagaggcacagaccactccaccagcagccacggaagcacagaccactcaacccacaggcctggaggcacagaccactgcaccagcagccatggaggcacagaccactcaaaccacagccatggaggcacagaccactgcaccagaagccacggaggcacagaccactcaacccacagccacggaggcacagaccactccactggcagccatggaggccctgtccacagaacccagtgccacagaggccctgttcgtggaacctactaccaaaagaggtctgttcatacccttttctgtgtcctctgttactcacaagggcattcccatggcagccagcaatttgtccgtcaactacccagtgggggccccagaccacatctctgtgaagcagtgcctgctggccatcctaatcttggcgctggtggccactatcttcttcgtgtgcactgtggtgctggcggtccgcctctcccgcaagggccacatgtaccccgtgcgtaattactcccccaccgagatggtctgcatctcatccctgttgcctgatgggggtgaggggccctctgccacagccaatgggggcctgtccaaggccaagagcccgggcctgacgccagagcccagggaggaccgtgagggggatgacctcaccctgcacagcttcctcccttagctcactctgccatctgttttggcaagaccccacctccatggtctctcctgggccacccctgagtgcccagaccccattccacagctctgggcttcctcggagacccctggggatggggatcttcagggaaggaactctggccacccaaacaggacaagagcagcctggggccaagcagacgggcaagtggagccacctctttcctccctccgcggatgaagcccagccacatttcagccgaggtccaaggcaggaggccatttacttgagacagattctctcctttttcctgtcccccatcttctctgggtccctctaacatctcccatggctctccccgcttctcctggtcactggagtctcctccccatgtacccaaggaagatggagctcccccatcccacacgcactgcactgccattgtcttttggttgccatggtcaccaaacaggaagtggacattctaagggaggagtactgaagagtgacggacttctgaggctgtttcctgctgctcctctgacttggggcagcttgggtcttcttgggcacctctctgggaaaacccagggtgaggttcagcctgtgagggctgggatgggtttcgtgggcccaagggcagacctttctttgggactgtgtggaccaaggagcttccatctagtgacaagtgacccccagctatcgcctcttgccttcccctgtggccactttccagggtggactctgtcttgttcactgcagtatcccaactgcaggtccagtgcaggcaataaatatgtgatggacaaacg

SEQ ID NO: 280 - DNA, 2451 bp, Homo sapiens
ggcggcggcgcaggaggcggacggggcccgcagcgccgtggtggcggccgggggaggcagctccggtcaggtgaccagcaatggcagcatcgggagggacccgccagcggagacccagcctcagaacccaccggcccagccggcacccaatgcctggcaggtcatcaaaggtgtgctgtttaggatcttcatcatctgggccatcagcagttggttccgccgagggccggcccctcaggaccaggcgggccccggaggagccccacgcgtcgccagccgcaacctgttccccaaagacactttaatgaacctgcatgtgtacatctcagagcacgagcactttacagacttcaacgccacgtcggcactcttctgggaacagcacgatcttgtgtatggcgactggactagcggcgagaactcagacggctgctacgagcactttgctgagctcgatatcccacagagcgtccagcagaacggctccatctacatccacgtttacttcaccaagagtggcttccacccagacccccggcagaaggccctgtaccgccggcttgccacagtccacatgtcccggatgatcaacaaatacaagcgcagacgatttcagaaaaccaagaacctgctgacaggagagacagaagcggacccagaaatgatcaagagggctgaggactatgggcctgtggaggtgatctcccattggcaccccaacatcaccatcaacatcgtggacgaccacacgccgtgggtgaagggcagtgtgccccctcccctggatcaatatgtgaagttcgacgccgtgagcggtgactactatcccatcatctacttcaatgactactggaacctgcagaaggactactaccccatcaacgagagcctggccagcctgccgctccgcgtctccttctgcccactctcgctttggcgctggcagctctatgctgcccagagcaccaagtcgccctggaacttcctgggcgatgagttgtacgagcagtcagatgaggagcaggactcggtgaaggtggccctgctggagaccaacccctacctgctggcgctcaccatcatcgtgtctatcgttcacagtgtcttcgagttcctggccttcaagaatgatatccagttctggaacagccggcagtccctggagggcctgtccgtgcgctccgtcttcttcggcgttttccagtcattcgtggtcctcctctacatcctggacaacgagaccaacttcgtggtccaggtcagcgtcttcattggggtcctcatcgacctctggaagatcaccaaggtcatggacgtccggctggaccgagagcacagggtggcaggaatcttcccccgcctatccttcaaggacaagtccacgtatatcgagtcctcgaccaaagtgtatgatgatatggcattccggtacctgtcctggatcctcttcccgctcctgggctgctatgccgtctacagtcttctgtacctggagcacaagggctggtactcctgggtgctcagcatgctctacggcttcctgctgaccttcggcttcatcaccatgacgccccagctcttcatcaactacaagctcaagtctgtggcccaccttccctggcgcatgctcacctacaaggccctcaacacattcatcgacgacctgttcgcctttgtcatcaagatgcccgttatgtaccggatcggctgcctgcgggacgatgtggttttcttcatctacctctaccaacggtggatctaccgcgtcgaccccacccgagtcaacgagtttggcatgagtggagaagaccccacagctgccgcccccgtggccgaggttcccacagcagcaggggccctcacgcccacacctgcacccaccacgaccaccgccaccagggaggaggcctccacgtccctgcccaccaagcccacccagggggccagctctgccagcgagccccaggaagcccctccaaagccagcagaggacaagaaaaaggattagtcgagactggtcctcacctgctccggctcctggcgaccactacccctgcgtcccggccccctcgcctcccctccctgtcgccctttccctggacagatcaggccggggcggtgggaggcccgcctcaggtcagggcccagcgtgtgatgtaggggccggggcaggccagggtttgtttgtggaggcgctgtctgtccctctgtccctctgtgtttccagccatctcgccctgccagcccagcaccactgggaatcatggtgaagctgatgcagcgttgccgagggggtgggttgggcgggggtggggccgggcccccctacgggatgcccacggccgttcatcatcttgtccctcgtccccctaccacactccccctcctagaccgccgccctttaacacagtctggatttaataaattcatatgggtgtttaacttaaactc

SEQ ID NO: 281 - DNA, 1874 bp, Homo sapiens
cccacgcgtccgaaaaaaataaccgtccgcgacgccgagacaaaccggacccgcaaccaccatgaacagcaaaggtcaatatccaacacagccaacctaccctgtgcagcctcctgggaatccagtataccctcagaccttgcatcttcctcaggctccaccctataccgatgctccacctgcctactcagagctctatcgtccgagctttgtgcacccaggggctgccacagtccccaccatgtcagccgcatttcctggagcctctctgtatcttcccatggcccagtctgtggctgttgggcctttaggttccacaatccccatggcttattatccagtcggtcccatctatccacctggctccacagtgctggtggaaggagggtatgatgcaggtgccagatttggagctggggctactgctggcaacattcctcctccacctcctggatgccctcccaaatgctgctcagcttgcagtcatgcagggagccaacgtcctcgtaactcagcggaaggggaacttcttcatgggtggttcagatggtggctacaccatctggtgaggaaccaaggccacctttgtgccgggaaagacatcacataccttcagcacttctcacaatgtaactgctttagtcatattaacctgaagttgcagtttagacacatgttgttggggtgtctttctggtgcccaaactttcaggcacttttcaaatttaataaggaaccatgtaatggtagcagtacctccctaaagcattttgaggtaggggaggtatccattcataaaatgaatgtgggtgaagccgccctaaggattttcctttaatttctctggagtaatactgtaccatactggtctttgcttttagtaataaaacatcaaattaggtttggagggaactttgatcttcctaagaattaaagttgccaaattattctgattggtctttaatctcctttaagtctttgatatatattacttgttataaatggaacgcattagttgtctgccttttcctttccatcccttgccccacccatcccatctccaaccctagtcttccatttcctcccgccagtctccattgaatcaatggtgcaggacagaaagccagtcagactaatttccttctttcctcgcacttctccccactcgtcatcttttaactagtgtttcacaaggatcctctgaaaccctctctgtgccccaagtacagatcccattacttctgctttcgtatctcctcaggcaaaagtggagggtgccttatgggccctcctcataggttgtctctgcatacacgaacctaacccaaatttgctttggtgccagaaaaactgagctatgtttgaacaaagatgtcgtgcaaactgtactgtgaacaacagttggtttaaaatatgaggggcaaggaggaggatgcatttcaaaagcttgattgatgtgttcagagctaaattaagaggagttttcagatcaaaaactggttacctattttttgtcagagtgtctgatgcgcccactctttcggctccccagaattcctagactgggttaatagggtcatattgtgaatgtctcactacaaatatgacttgagtccagtgaaatctcattagggtttaagaatatttcagggatccttaatgttttgatttttgttttctgaaattggattttattttattttatcttatatatttcagttcatctaaattgtgtgttctgtacatgtgatgtttgactgtaccattgactgttatggaagttcagcgttgtatgtctctctctacactgtggtgcacttaacttgtggaatttttatactaaaaatgtagaataaagactattttgaagatttg

SEQ ID NO: 282 - DNA, 1050 bp, Homo sapiens
  misc_feature 330: n = a,c,t, or g
tgtgtatccaaattttccctttttataaggacaccagtcatattggattaggggcacactctcttccagtatgacctcattttaactaattacatctgtaatggtgcctattttcaaataaggtcactttctgaggtactgggggttaggacttcaccatgtgaattttgaggggacataattcatcctgtaacaccatcttgcaattgtctgcacctcacgttcttaatcacagtcgccttgaagtaaagcaccatcttttctcatattcctttgttgagcactagtcacgtggctgcacctggaggtgaagtggcctgggaaatgtantcccgtgctgaatagtgattgtgctagatggccacatgcacacacaggagccaccccatctttctcagaatgtgtatcaaactctcctgtatcttccagtgcttctgagcacacctgtccagagagctctcaaaaaggtaatcagtgttcaagtttgagaatcctattctagcatggctaggaatgcttttcagttaacaccctaaggatttatatgtaagtgagtgcctaaggttgcgttactgttttgttttcttaagaatctaatatattctcaagggaattttacttacactagggttaatcactttttcttcttgtgaaactagtgaaatccaaatgaatgaagtttaactcttagccaaaaacttagcttgtggttagagtgattttctacagtacagtaactttttttgttacatgttctactattgctgaaaaatgatatatttccaagagggagaaaaggatattgtgagtgcagaagacggttgtataacctgctttgcttatctcaaatggctagactttagtatttaattaaagaagtcttgcctctcctatcaagttagtcattatttctgaaggttgaacgtgggttttgtaagtgactaattgctttgtatgttccttttcaattacaataagaagttatgaattctctacatttagaactgctaaaaattatttagatttacctgttgaataggtttattcttt

SEQ ID NO: 283 - DNA, 3384 bp, Homo sapiens
gaaatcctttttggctgtttgccagcagtgcctgtctaatgttaatactccagtgaaagaacaggctttcatgttactctgtgatcttctgatgattttcagccaccaattaatgacaggtggcagagagggccttcagcctttggtgttcaatccagatactggactccaatctgaactcctcagttttgtgatggatcacgtttttattgaccaagacgaggagaaccagagcatggagggtgatgaagaagatgaagctaataaaattgaggccttacataaaagaaggaatctacttgctgctttcagcaaacttatcatttatgacattgttgacatgcatgcagctgcagacatcttcaaacactacatgaagttatttaatgaacttgttcaagagcaaggtcccaacctagataggacatctgcccatgtcagtggcattaaagaactggcacgtcgctttgcccttacatttggattggaccagattaagacacgagaagcagttgccacacttcacaaggatggcatagagtttgcatttaaataccaaaatcagaaaggacaagagtatccacctcctaatctggcttttcttgaagtactaagtgaattttcttctaaacttcttcgacaggacaaaaagacagttcattcatacctagagaaattccttaccgagcagatgatggaaaggagggaggatgtatggcttccactcatctcctatagaaattcattagtcactgggggtgaagatgatagaatgtctgtgaacagtggaagtagcagcagcaaaacctcatcagtaaggaataagaaaggacgacctccacttcataaaaaacgagtagaagatgagagtctggataacacatggctaaacaggactgacaccatgattcagactcctggccccctgccagcaccacaactcacatccactgtactgcgggagaacagtcggcccatgggagaccagattcaagaacctgagtctgaacatggttctgaaccagactttttacacaatcctcagatgcagatctcttggttaggccagccgaagttagaagacttaaatcggaaggacagaacaggaatgaactacatgaaagtgagaactggagtgaggcatgctgttcggggtctaatggaggaagatgctgagcccatctttgaagatgtgatgatgtcatcccgaagccagttagaagatatgaatgaagaatttgaggacaccatggttattgatctgcctccatcaagaaatcggcgagagagagctgagctaaggccagacttctttgactctgcagctatcatagaagatgattcaggatttggaatgcctatgttctgaagtctgaagaaaatttacaaatctggaactctattatttagagctagaggcctatatactgtgatagcttgtatggggaaaaacacttttgatgtgatctgatttgttttttaatcaaatgattaaggtcaatccctttttgcagtgacagaagaggagcatgtaaattacccaagggaatgttggtgaatgtcaactcagaaagactgacctgaaaatcatttgtgtcctactgttggacttatcccaatacagatgtgtgtgtttttctggagggaggaagaaattttaaatttttaaaacagctgtcaagataaacactgttatacacctgttttatgaaaactcaacattgagtaaaaaaaaacatatttttaactttattttcctgttgacaatttaaaaaccgttttaacattttgcctttttatgttttaaaagctaaccatttttattaaacctatgagtaagcagctcatcctaattgcgaagagtgttttggagttcactggatttggttgacctttgtggaacacaaataatgaaggagcagaacattgacaagctaagatgaaattctgacatagtacatctctgccaaaaaccacacaccctctgtggatatggatatgaattcccagattttatatactcttgaataaaaggtttatttttatttataagtgggcataaaataagaaatgtccatgcagccatttttccaacagatgctgtacaccgttcattttatatagactagggagattcaaatacagtgcattttctattggtatttgttctgtgcatttttagcaacttctaccagcaaataaagtattctcagtaaaacgaaaatgattctcaagttatcagtttgctgtttttaccacttatttcatgccctgccaaattcaagttacacagacttccattttcttaagataatcaatcatgaagaaatcctttatcaatcattcaaaagtaattttaagtgtaacataactgtgtttacttcccatgcacttaatacccttatgcgctaattttgtgaattaagtttactgattatagaagtatgtgctgcatagaagtctgtgcttagagggtgaagttcctaagcttaccttgaattacagctacatttcagtgttaaatgtgcatattaagaataattcttttggggaaagaaattatgaatcttcaggacagtctacaatggtttagagttacattctgcctagacttttatgacttgctgctattgttttaaaaaccccacttagtctcttcctttctgatttctaaagtaagcctcagaatttccaaaccaattcatccacagctgtttctgggctggtttttaaagtagctgcaacagaatcatgaggctttccctttttatcaaatacgaaaaacattttttaaaattctgcacacccagtgatcatcttttgtgcgggaaagcaagatgatgatggatgattttattcatccttttagtaaagacacaaaacatttttctcaacatttgtacagttctgaaaaaaacctggtcaccaaaaatatcttctctgctaattcagcaattcttgggctccagttaggggagctggggcctcactttctcccagaattgtgggcttcactggaagtgaaggtgcaggaatgactggactgtccaccccagccctgcctgcctgtggttttggccagggagcaagccatgaggtgccctggcacatgcacaaattgatcctttgcgtgacagtcttgtatggaaaacagatgctgacagaattgtagactaccatgccacacaaaaaggctaaatatctactccaatgggtttccagttcagtttgaagtcaatcaaatttttgtattttcggtgtctccttgatggtttttgctagtaattctgtaaattgtacatttgcaatatgaggttttttttccttttgtacaatttgaaactgatgcttcacctttcctttaataaactattcaaaatcagg

SEQ ID NO: 284 - DNA, 2571 bp, Homo sapiens
gtacagggtctgtgcagtggagtaggcacttcagtggtcgaaccatcaccctgcaacctggatccccttgcaacgattttagaggttactgtgatgttttcatgcggtgcagattagtagatgctgatggtcctctagctaggcttaaaaaagcaatttttagtccagagctctatgaaaacattgctgaatggattgtggctcattggtgggcagtattacttatgggaattgctctgatcatgctaatggctggatttattaagatatgcagtgttcatactccaagtagtaatccaaagttgcctcctcctaaaccacttccaggcactttaaagaggaggagacctccacagcccattcagcaaccccagcgtcagcggccccgagagagttatcaaatgggacacatgagacgctaactgcagcttttgccttggttcttcctagtgcctacaatgggaaaacttcactccaaagagaaacctattaagtcatcatctccaaactaaaccctcacaagtaacagttgaagaaaaaatggcaagagatcatatcctcagaccaggtggaattacttaaattttaaagcctgaaaattccatttgggggtgggaggtggaaaaggaacccaattttcttatgaacagatatttttaacttaatggcacaaagtcttagaatattattatgtgccccgtgttccctgttcttcgttgctgcattttcttcacttgcaggcaaacttggctctcaataaacttttaccacaaattgaaataaatatatttttttcaactgccaatcaaggctaggaggctcgaccacctcaacattggagacatcacttgccaatgtacataccttgttatatgcagacatgtatttcttacgtacactgtacttctgtgtgcaattgtaaacagaaattgcaatatggatgtttctttgtattataaaatttttccgctcttaattaaaaattactgtttaattgacatactcaggataacagagaatggtggtattcagtggtccaggattctgtaatgctttacacaggcagttttgaaatgaaaatcaatttacctttctgttacgatggagttggttttgatactcattttttctttatcacatggctgctacgggcacaagtgactatactgaagaacacagttaagtgttgtgcaaactggacatagcagcacatactacttcagagttcatgatgtagatgtctggtttctgcttacgtcttttaaactttctaattcaattccatttttcaattaataggtgaaattttattcatgctttgatagaaattatgtcaatgaaatgattctttttatttgtagcctacttatttgtgtttttcatatatctgaaatatgctaattatgttttctgtctgatatggaaaagaaaagctgtgtctttatcaaaatatttaaacggttttttcagcatatcatcactgatcattggtaaccactaaagatgagtaatttgcttaagtagtagttaaaattgtagataggccttctgacattttttttcctaaaatttttaacagcattgaaggtgaaacagcacaatgtcccattccaaatttatttttgaaacagatgtaaataattggcattttaaagagaaagcaaaaacatttaatgtattaacaggcttattgctatgcaggaaatagaaggggcattacaaaaattgaagcttgtgacatatttattgcttctgttttccaactacatcacttcaactagaagtaaagctatgattttcctgacttcacataggaggcaaatttagagaaagttgtaaagatttctatgttttgggttttttttttcctttttttttttaagagtataaggtttacacaatcattctcataatgtgacgcaagccagcaaggccaaaaatgctagagaaaataacgggatctcttccttgtaaacttgtacagtatgtggtgactttttcaaaatacagctttttgtacatgatttagagacaaattttgtacatgaaaccccagatagactataaataattctaaacaaacaagtaggtagatatgtatgtaattgcttttaaatcatttaaatgcctttgtttttggactgtgcaaaggttggaagtgggtttgcatttctaaaatggtgacttttattctgcaagagttcttagtaacttcttgagtgtggtagactttggaacatgtaaattttttgcttgtaatgttatcctgtggtaggattttggcaggtacacacactgccctattttattttgagtctaatttaaatgttttctgaaaagagatacatgcactgaactctttccactgcgaatcaagatgtggtaatataaaaggatcaagacaaatgagatctaatactactgtcagttttaatgtccactgtgttttatacagtatctttttttgttcactttggaaatttttactaaaaattgcaaaaaataaagtattgtgcaaagatgtaaggttttttgaaacttgaaatgcattaataaatagacgattaaatc

SEQ ID NO: 285 - DNA, 1861 bp, Homo sapiens
ggacccacctcccctaagctgctgagtttgaaactggagaacaaggaggcaaaggtctcgaagcgggagaaggcggtgtgggtgctgaaccctgaggcggggatgtggcagtgtctgctgagtgactcgggacaggtcctgctggaatccaacatcaaggttctgcccacatggtccaccccggtgcagccaatggccctgattgtgctggggggcgtcgccggcctcctgcttttcattgggctaggcatcttcttctgtgtcaggtgccggcaccgaaggcgccaagcagagcggatgtctcagatcaagagactcctcagtgagaagaagacctgccagtgtcctcaccggtttcagaagacatgtagccccatttgaggcacgaggccaggcagatcccacttgcagcctccccaggtgtctgccccgcgtttcctgcctgcggaccagatgaatgtagcagatcccaggcctctggcctcctgttcgcctcctctacaatttgccattgtttctcctgggttaggccccggcttcactggttgagtgttgctctctagtttccagaggcttaatcacaccgtcctccacgccatttccttttccttcaagcctagcccttctctcatcatttctctctgaccctctccccactgctcatttggatcccaggggagtgttcagggccagccctggctggcatggagggtgaggctgggtgtctggaagcatggagcatgggactgttcttttacaagacaggaccctgggaccacagagggcaggaacttgcacaaaatcacacagccaagccagtcaaggatggatgcagatccagaggtttctggcagccagtacctcctgccccatgctgcccgcttctcaccctatgtgggtggggccacagactcacattctgaccttgcacaaacagcccctctggacacagccccatgtacacggcctcaagggatgtctcacatcctctgtctatttgagacttagaaaaatcctacaaggctggcagtgacagaactaagatgatcatctccagtttatagaccagaaccagagctcagagaggctagatgattgattaccaagtgccggactagcaagtgctggagtcgggactaacccaggtcccttgtcccaagttccactgctgcctcttgaatgcagggacaaatgccacacggctctcaccagtggctagtggtgggtactcaatgtgtacttttgggttcacagaagcacagcacccatgggaagggtccatctcagagaatttacgagcagggatgaaggcctccctgtctaaaatccctccttcatcccccgctggtggcagaatctgttaccagaggacaaagcctttggctcttctaatcagagcgcaagctgggagcacaggcactgcaggagagaatgcccagtgaccagtcactgaccctgtgcagaacctcctggaagcgagctttgctgggagagggggtagctagcctgagagggaaccctctaagggacctcaaaggtgattgtgccaggctctgcgcctgccccacaccctcccttaccctcctccagaccattcaggacacagggaaatcagggttacaaatcttcttgatccacttctctcaggatcccctctcttcctacccttcctcaccacttccctcagtcccaactccttttccctatttccttctcctcctgtctttaaagcctgcctcttccaggaagacccccctattgctgctggggctccccatttgcttactttgcatttgtgcccactctccacccctgctcccctgagctgaaataaaaatacaataaacttactataaagatg

SEQ ID NO: 286 - DNA, 2153 bp, Homo sapiens
caactgcgtgcacagggacattgctgtccggaacatcctggtggcctcccctgagtgtgtgaagctgggggactttggtctttcccggtacattgaggacgaggactattacaaagcctctgtgactcgtctccccatcaaatggatgtccccagagtccattaacttccgacgcttcacgacagccagtgacgtctggatgttcgccgtgtgcatgtgggagatcctgagctttgggaagcagcccttcttctggctggagaacaaggatgtcatcggggtgctggagaaaggagaccggctgcccaagcctgatctctgtccaccggtcctttataccctcatgacccgctgctgggactacgaccccagtgaccggccccgcttcaccgagctggtgtgcagcctcagtgacgtttatcagatggagaaggacattgccatggagcaagagaggaatgctcgctaccgaacccccaaaatcttggagcccacagccttccaggaacccccacccaagcccagccgacctaagtacagaccccctccgcaaaccaacctcctggctccaaagctgcagttccaggaggaggacttcatccaacccagcagccgagaagaggcccagcagctgtgggaggctgaaaaggtcaaaatgcggcaaatcctggacaaacagcagaagcagatggtggaggactaccagtggctcaggcaggaggagaagtccctggaccccatggtttatatgaatgataagtccccattgacgccagagaaggaggtcggctacctggagttcacagggcccccacagaagcccccgaggctgggcgcacagtccatccagcccacagctaacctggaccggaccgatgacctggtgtacctcaatgtcatggagctggtgcgggccgtgctggagctcaagaatgagctctgtcagctgccccccgagggctacgtggtggtggtgaagaatgtggggctgaccctgcggaagctcatcgggagcgtggatgatctcctgccttccttgccgtcatcttcacggacagagatcgagggcacccagaaactgctcaacaaagacctggcagagctcatcaacaagatgcggctggcgcagcagaacgccgtgacctccctgagtgaggagtgcaagaggcagatgctgacggcttcacacaccctggctgtggacgccaagaacctgctcgacgctgtggaccaggccaaggttctggccaatctggcccacccacctgcagagtgacggagggtgggggccacctgcctgcgtcttccgcccctgcctgccatgtacctcccctgccttgctgttggtcatgtgggtcttccagggagaaggccaaggggagtcaccttcccttgccactttgcacgacgccctctccccacccctacccctggctgtactgctcaggctgcagctggacagaggggactctgggctatggacacagggtgacggtgacaaagatggctcagagggggactgctgctgcctggccactgctccctaagccagcctggtccatgcagggggctcctgggggtggggaggtgtcacatggtgcccctagctttatatatggacatggcaggccgatttgggaaccaagctattcctttcccttcctcttcggccctcagatgtcccttgatgcacagagaagctggggaggagctttgttttgggggtcaggcagccagtgagatgagggatgggcctggcattcttgtacagtgtatattgaaatttatttaatgtgagtttggtctggactgacagcatgtgccctcctgagggaggacctggggcacagtccaggaacaagctaattgggagtccaggcacaggatgctgtgttgtcaacaaaccaagcatcagggggaagaagcagagagatgcggccaagataggaccttgggccaaatccgctctcttcctgcccctctttctctttcttcctttactttcccttgcttttccctcttttcttactcctcctctttctctccccaacccccattctcatctgcacccttcttttctcatgtgtttgcataaacattcttttaacttctttctatttgacttgtggttgaattaaaattgtcccatttgc

SEQ ID NO: 287 - DNA, 1767 bp, Homo sapiens
gaagacacctccagaattaccagcctggaggtgtcaagtttttgttgcagggtaaggtttcaagactggctgggccagctgtactgttaacccagcagggaggcaagcagaggcccccactaggtcccatgtccaagagtttccctcacctcaaaggaacccagtccagcattgctggccaagatatacctgttcaaacaagttattttttagttatttattaaaaattgagatgctggtaaatttatttttaagacagggtctcagctgggcgcagtggctcatgcctgtaatctcaacactttggaaggctgaggtgggtggctcacctgaggtcgggagtttgagaccagcctggccaacatggtggagccccgtctctgctgaaggatacaaaggttagctgggcgtggtggcacacacctgtgatcccagctactcaggggaggctgaggcagaagaattgcttgagcccgggaggtggaggttgcggtgagctgaggtcacaccactgcattccagctctgggcaacagagcaagactgtcttagtgggggtgggggcggggagggcggtgagaaggatcttcctctgtcgcccaggctggagtgcagtggtgtgtcagctcgctgcaacctctgcctcccgggctcaaaagatcttcccaccttggccctccctgcacagtggttgggactgcaggcctgcatcaccatgcctggctcatttttatattttttgccgagatgagatttcgccgtgttggccaggctggtcctgaactccagatctgcccatctcggcctcccgaggtgctgagattacaggcatgagccaccacatccagccataatttttaaaaatggcttcctgaggttttacaagaaaatatgcacctcaaaatacacaaataggcatgggaatagagtacagtgaagtgaaagataaaatgtactgagagctgggagtaggagagacaaggccctggctgagggggtgtcagtgggcctcccaacacctcaagccaatccacttggaggtctcccaaagttcatcaggagaaccacctacagccaagaacagaaaaggattcaagaaagccgcacagatatcatgccctgacctgcaatgaggctgctcacttcccatgacttctgcttgataccattcaaccctggttagctcatgctgaagaaatatttactagaagcctcagatatgggtgcctagaaggaaaaagatccaagttctctgtggtggtgcaacctgtgggaactattgcctcatgctcagaaggccaagcactaggctcccatacaatacctacaagacagacactctgggagggagatttctcttttggagggagaccccaggtgctctcctctgggtgcccgagtgttggaatgggcggatgccaagacttcattctagctcttggtcagcagcagcactaagggtctctgagaagcatcagagatttcaccactgatgaactgccaggaggctagtgggggcggactgaggagacactgaaacaccgaagctgccgccaccaccggctgatgcaagttttattgagacaatatacaaacaggccatggaaacaagggttttgatgctgggaccagtaacgtaaaacggaatacaaaaataaaaaggcactaatctgttaagaaaagacactcgatgtattctaagaatataagtcatttaatactgttaattttatagcacaaaataaaacaagctatgatccccaaaaat

SEQ ID NO: 288 - DNA, 398 bp, Homo sapiens
gaagtggtgtaggaagagggagacggaatgggatctgaggagggctgcacagcacacagtaggcggcacaaaagtctgctcagttaggtcacatgctccagaggcactcactgcaaaagagcctgaagattgaactgaaatatgccatcggctttgctgagtatgaatgccaagaggagcagagagaagtcaagccctctaggtgataggcaggaacgagctgaaagaaggacataaatcttggtttgctcagacgggcctggattatacttacgttaattatgtttagtgcccttttcatgctaagaagtgtcctactttggatgataaattgtacagtcactctaggtttaagtgatactcaggcagtctggcttggaaagtcaagtcaggagaag

SEQ ID NO: 289 - DNA, 520 bp, Homo sapiens
cgggtctatcgatggaggggaggggcttatggatgggtggggcgggtctagcgatgggggcggggcttggggccgggcttggagcggggccagtgtctgctgcctccagtctgccctgagtccctcttctggtcctttaggcacatcttggaaggtccgtcctgctcggcttttcgcttgaacattcccttgatctcatcagttctgagcgggtcatggggcaacacggttagcggggagagcacggggtagccggagaagggcctctggagcaggtctggaggggccatggggaagtcctgggtgtggggacacagtcgggttgacccagggctgtctccctccagagcctccctccggacaatgagtcccccctcttgtctcccaccctgagattgggcatggggtgcggtgtggggggcatgtgctgcctgttgttatgggttttttttgcggggggggttgcttttttctggggtctttgagctccaaaaaataaacacttcctttgagggagagc

SEQ ID NO: 290 - DNA, 2241 bp, Homo sapiens
aaaaggttcaccggagtttacaaactcagtgtcctcagcttcatcagggtcctcccacatgtccccattccaagttgccaggtcgcatgcttttccaacaaatgccctcactttaacagtagacacctggtgaggctgtgcatgcatctttcattgctggtcagccactcgtgtaagagcttgggtctgtttttccacagtttcagctcgttttctacaggagataagactctcattcagggcagtcttagcagatttgaggctccatatctgcttctgaacctgggagacagaatacttgagttcatcattttctttcatcactttgtccactgaacttaggagcaaccaaccagcttcattatgttccttgattctccacatatggtcaaaggtattatgtatagagtcactaaactccttgcctctcaagagtggtgaatcaggagtctcaattgcatttactttgtataactctctacacagtttccaccaaaaactatcagtgttctccatactattagaagtagagaccttagcatttttgggtctaatcatattaatcagccaactccagagactcccaaaccaatgaaagaactccatcctttatattctattcctctagaaccacactcccagtaccaaaatctaatctgtattagggttctcttagagggacagaactaataggagaatatatatatatatatatatatatatatatatatatatataaaggggagtttattaagtattaacttacacaatcacaaggtcccataataggctgtctgcaagctgaggagcaaggagaaccagtccaagtcccaaaactgaagaacttggagtctaatgttcgaggggaggaagcatccagcatgggagaaagatgtaggctgggatgctaggctaatctcctctttttcatgtttttctgccttctttctattcactggaagctgattagattgtgcccacaagattaagggtggatctgactttgccagcccactgactcaaatgttaatctcttttggcaacactcacacaaacacacccaggattaatactttgtatccctcaacccaatcaagttgacagtcagtattaaccatgacaggattcctttgactccatgccccttccagatgggccattgccctaccctgcttttcttcattttatgtgggtcaagccatccccctagtcactcccaatgtaagaacccagatatttcggttgaagatgctgaattcactcaccattttcattcttttccatgagagccattgacggcagcggctctgaatcagccatctttgcctctctcccttcttctgttttttaagatagggtcttgttctgtcacttaggctggagtgcagtagtctgatcacaacttactgcagccttgaattcctgtactcacacaattatcctgccctagcttcctgagtagctgggactacaggaacatgctaccatgcctggctaatttttaaatttttttgtagggtctgggtctcattttttgtagagctggtcttgaactcctggtccctttttttttagagctggtcttgaactcctcctgcctcagcctcccaaaatgccaggattagctgtgtgagccatgcttataccactgggcgtgatggtgttgtttttattgatcacaatgtgcttcaaggtaaatactacttcagcatgatacccattttttaaagcttaaaaataaatatggcaaaataatatatttttagatatatctatatttatacctacacctgccctctctatacatagatatatatgtagactataaagaaaagcacagggattatggacataaccttcagaagagtggtcatctctgtgatgaagcaaggggactggatcagagaagaaattccagcagtcctgtagcttccacaggactagaaatatttcattctgcatgaagtgatgggtgtatggatgttatttaattgttatgcttcataacttagattcacatcccactttgagaatatctcctatagaaacaaaggacttgtatttaagaatgtgtaagaagagtcaccacggagctgacatgggggctggtggcacctgggcgcaacgccgtatgccaactcgcctaccgcgtggatcacggagctcactgacgagaatgtcaagttcatcatatatatatatgtagatgtgacttaatatttcaatgagaaacactgaaat

SEQ ID NO: 291 - DNA, 1827 bp, Homo sapiens
gtgagccaagaccgtgccactgcactacagcctgggtgagaaagcaagactccatctgaaaaaaaaaaaaattaaaaaaaaaaaagtccatcagcttatttcaataaatgtcccaaagtagctttgaatatgttttccccaagaagcatcttgctgttcaaaataaagtaactgagagagtccttatattgtgagagatcttgaacgtatgtaaatgtcagagcaattccctcatttttgagaaataacattttagggggtaaaatccaggagatcactaggttatatccaggctgtatagtgtatgagtgtttataagtggtgtatttcactttctgtcttatgtgcattggagttttatgctgtagttagtgaatattggtcccactcttggcagtgaacataatgtctatggtacatctatccctagatatctgcttggctgattccttcacctccttcaaatcttcgttccaggttacctcagtgcacctaccttcccacccatctttaagagagcagcttgcctcctgccactccctaccctagtattttggactccctttgtctcctctattttccttttacctaaagttcttgccacctcttaagacacgttactgtttttacttattgtgtgtattgtttcttgtcttttttttttgtttgtttgatgctgagctcagaataggtcatttagcatgtgctcagtgaatgtttatagaatgaaagagcaagagcctgtgtgtttccaaggcttgcagggcctcagaattgtatgggaacagatgctgtgaacagtgatgcaatgaagataaagtacagagggttaggagactcacacattttctttttttgcaactccaagtagcttttttcagtatctggcatggttgggacttgttgaaaaaccctccctggaagtgacttgtgagggttggatatcacctgttaatgcttcatacgtcccagcagactcatttacaaatatggaatttgctgttatcaccaggaaaatttccagacttttatttatgatatatatatatgtgtgtgtgtgtgtacatatatacacatataacttttatgtatgtataagtaatatatacttatatatgtaatatatacttttatatagatgtaatatatatttatatatgtaaactttttatgagctggaacatgttttgagtgtcaattatgcaccgtcagtgaacacatggggcagctgactggtttacagcacaggttgaactttcccatctgtgtgttcagaagtgctgaacatcccacctcggtgacacctcctgtctgggatccagcacagataatgagtgtgggaatttgaactaacctcatggcatgtgagggtggggtgtcttgtctgagaaatggagtgtatcctggcaggcagttaggctgcctgctgtatcttcccctgacactggaaggtttcattttaattgcttgtgattatgtaaaatcttttctgagggttttgagaatcagtgtgacagaattacaacccacataaggttttccccttttctgcctttgggagaattcccactcaaagagccaggtcccattaggattggagtcagcagggctgaagatggctagaggacactgcagggagggagaaagcacttggagatgagatactcaattattgaaactgacttgcctcctcaagaaatctggaactttaaacccagttccagaattctctcctgattccagttaaagaaacctactacctaataacttaggcagccatttaggtgggatgtttcactttctgaaattcttagctttcttccccgt

SEQ ID NO: 292 - DNA, 1845 bp, Homo sapiens
ggggatctggccatatagcaaatctcatcaagtcactctgggcttaaagctcttgaatgtctccccattgactacgggacaaaatcccaaacccttaatttggcctacaaaaccagaattataatgagctaccatggcagaatatttactatgcacaacgtcaagcactttacacacattcattttattcatgatctggaccttcaaaccatctcttcttgatccagtcccagctaccatgaactacttcataatttccctaaatgtgccaggttctttcatgaccctgatcctttgtgtttttgtttatttctttctttgttttgttcgtttttgagccagagtctccatttgtatccaggctcactgtagccttgacctcctgggctcaagtgatcctcttacctcagccccctaagtagctgggactgcaggagcacaccaccaccgcacctggctcattaaatttttttttttttgtagagacaagatctcactatgttgcccaggctggtctcaaactcctggcctcaaggaatattcctgcttcagcctcccaaagtgttgggatttcaggcatgagccaccgtgtccagctcctgagtctctgcatatgctgtttgcccttactcttcttcccctcttgacctaattcagccttcgagtcttagcctagatgtcgcctccaccaggcagccttccctgaacttccttctaccccggctaggacaggttccctctcttgtactaccacaatggtctaagctcataatgtttgtcaattttcctcatccactaggctgtgcgctgcttaagggtggggcctggggcttattcacccttgtaaccccatgctcagtactgtgcctgaccctctgtaaatatttgatgaccatgaacagaccactctgggttgaagtctaggtggctttttcaggtagcccgtttatttatttattttttgagacaggatctccctctgtcgcacaggctggaatgcagtggtgtgatcttggctcactgtagcctctgcctccaggattcaagcgattctcctgcctcagcctccggagtagctgtgactaaaggcacacatcaccaggcccagctaatttttgtgtttttagtagagatgggggtttcaccgtgttgaccaggctggcctcgaactcctgacctcaagcaatctgcctgcctcggcctcccaaagtggtgggattacaggcgtgaggcactgtgcctggccaggtatccccgtttctattccaggctctggtttctgtggtgggaacaccaaggcagcaccctgtgggctgcctgctgtggccgagtctctgtcagtagcctggagtcttttattcccaatatagggatgagcagttgagcaaagatcctaaggctttccatttctccagctacttttctgaactaagaagcctgggtagacaataggtctgggctgagagaggtggttggaataagctgggctcctctccctggcaccagggccggctgcatagatttagaaaggcccatgcttactgggtgtggaggctcatgcctgtaatcccagcactttgggatgccaaagtgggaggattgcttgtggccaaaagttcaagaccagcatgtgcaacatagaaccccatctctacataaaataataatagtaataattagctgggcatagtaggtgctcctgcagtcctagctacttgggaggctgacgcagggggtgattgcttgagtccaggagttcgaggctgtagtgagccatgattgcaccactgcactctagaccctgtctcaaaaaaataaaaacaagatgaaaataaaaataataat

SEQ ID NO: 293 - DNA, 1241 bp, Homo sapiens
agatggaatggggtgagaggggaggtgagcctggagagatggtttggggccagatggggaaagctgtgttatggggcttgtcagtttctgccagccaaggcttcagcatagctgactgtaacaaagttgggaaggccttgcttttgagagccagaccaggagtacctgtgactaacaaggggtctgggaggatctgctgctcccatgccctcctttgtatattttaaatctgtttgagccttctgggctcctgtgaattagggagaggcagctcctcagtctaactcctattgtgaccaggttgcctaattggccctttggtttgggcacccactgtcctctgcgtggttggatagatgctgctcccaatgtccctgatctcttacagacccctctgattcttcactcttggctttgagagcccctgatgccctgcagtcttgactgagcttctaatggttgatcagacccttgaatgttgagctctttccatactagacttgaatattctcctgcccatttgatttgttaattaggattcattggctgtttctctgctctcctcttttctctctgttcctgctggttcaagtttaacctccattttctttctcctctgggaagtttcccttatgcctcttgaacagggtcaagagcacttaggagctcagatttacactgtatatcatgagaaaagcattgaaagtttcaaagcaggagagtgacataattagctttatgttttaaagcggatttttgactttagattctggcaatacagtggtcctgtggtctaagacatctgactaaccttcctgctagcaacaattaaaaatgctgagtgcaataaaaaactagcccttaaatggaatgaatgagtcgactacttggtaaggatgctcagaggctaaaactgaatcaaagcaggaactcttagaagtaagcagtgtgttggctaggcgcagtggctcagcctgtgatcccagcactttgggaagccaaggcaggtggatcacttgagctcaggagtttgaggcccgccggggcaacatggcaagaccccgtctctaaaaaaaaaaaaaaatgccaaaattaggcagacatggtggcacacacttgtagtcccagctgctcgggagcctgaggtgggagaatcgcttgagcccaggaggtggagtttgcagttagctgggattgtgtcactgcactccaccctgggcaacagagcaagactccatctc

SEQ ID NO: 294 - DNA, 1608 bp, Homo sapiens
aaatcatggcagcgtttgcatcattcagctatttttctgtcatttttgtagaaaatgtaagattgcagaggtttttaccagtattatgaagttatatcatgaggatgtgtgcggtagtagaatttttcgacagcagagacatttgaaagccattacagttgatcttgaagaaacaaaagcatggacggtattgtattgtctggaatgtgtgtgaaatgcagttgttctaaaattctgccacactttgcccagtggatttttactatttctatccgttgcctcatttgaaagaaactttttgaaattaatagaaaagcagtttaactccaaagaaacattgacagatatgactagtaactgttgaacatgataaggattatgttcaggtcattatggatcattgacaaattgcagaacataaggcttaaaaataaactgtgctgttattcatgagtgagataaataggtggggtggtttcaaaaaatacactaatgttaaaagtgtgactccattattttgtttctcctgtgacatggattcttactgacatgattatagataaagctcggtacacattttcactgcatttctcttctgcccattgtgattgatcattcctgatttctgaaagtaactgggttgtgggggagggtggcgtgcgctgtgcaccccaggggtggggtctgagtccttgctgccgctccccccactgaggagtgctgctgtctgctcttgttttgaacagcgccatcatgaccgggtcctataacaacttcttcaggatgtttgatagagacacgcggagggatgtgaccctggaggcctcgagagagagcagcaaaccgcgcgccagcctcaaaccccggaaggtgtgtacggggggtaagcggaggaaagacgagatcagtgtggacagtctggacttcaacaagaagatcctgcacacagcctggcaccccgtggacaatgtcattgccgtggctgccaccaataacttgtacatattccaggacaaaatcaactagagacgcgaacgtgacgaccaagtcttgtcttgcatagttaagccggacatttttctgtcagagaaaaggcatcattgtccgctccattaagaacagtgacgcacctgctacttcccttcacagacacaggagaaagccgctccgctggaggcccggtgtggttccgcctcggcgaggcgcgagacaggcgctgctgctcacgtggagacgctctcgaagcagagttgacggacactgctcccaaaaggtcattactcagaataaatgtatttatttcagtccgagccttcctttccaatttatagaccaaaaaattaacatccaagagaaaagttattgtcagataccgctctttctccaactttccctctttctctgcgatcacacttgggccttcactgcagcgtggtgtgcccaccgtccgtgtcctctcggccttcctccgagtccaggtggactctgtggatgtgtggatgtggcccgagcaggctcaggcggccccactcacccacagcatccgccgcccaccttcgggtgtgagcgctcaataaaaacaacacactataaagtgtttttaaatcc

SEQ ID NO: 295 - DNA, 2236 bp, Homo sapiens
agacccttgagtggctgtccctgaagacgtacaagtggcagggcctctggaacattccgacctacaagtacgtcgtgggggctgcgagggcagggccgggtgggggttacctggaggcagcctcagcgtccgtgctccagcagaccccgagcaccaggcccgtccagtgtgcggctcaggaggggtgaccgtggggctttgcctcctggaacctccctctgacctggtgtcactcaagcccggccgcccctcacagtggccatggcgtctgacccacgtacctccctcctcaatccctggccggcctggcgcaggggctgtgggatcattccgtgcttctccctcccttggttgctttggttatgaaatagttgcaggtactttgtcattatgactttggaatttaaaaaagaaacagaagtctaaggaaaggcctgggggacgggggtctcccctcctgcctgtgggtgccccggctctgcctggctctgcagacatggctagctcacggcaccgtggagcgccctctgaggcgctgcagccactgctcaagctggaagagactgaacagcagagggccgtggagaagcagggcttgtagctgggtggccagacctcggagaacagccgggcagcagctgggtaaccaggaacagagtctgtggcccgatggcacagggcggggcggggtgaccaagagcagagctcgtccgatggcacagggcggggccgggtgaccaggaacagtctgttgcccgatggcacagggcagggttcggtgggctgccttcctcaggctgccggctctgtggttcccaggggcaagatgaagaggatcgccttccagttcacgccgtacagctgggttcgcttcgagtggaagccggcctccagcctgcgtcgctggctggccgtgtgcggcatcatcctggtgttcctgttggcagaactgaacacgttctacctgaagtttgtgctgtggatgcccccggagcactacctggtcctcctgcggctcgtcttcttcgtgaacgtgggtggcgtggccatgcgtgagatctacgacttcatggatgacccgaagccccacaaagaagctgggcccgcaggcctggctggttggcggccatcacggccacggagctgctcatcgtggtgaaagtacgacccccacacgctcaccctgtccctgcccttctacatctcccagtgctggaccctcggctccgtcctggcgctcacctggaccgtctggcgcttcttcctgcgggacatcacattgaggtacaaggagacccggtggcagaagtggcagaacaaggatgaccagggcagcaccgtcggcaacggggaccagcacccactggggctggacgaagacctgctggggcctggggtggccgagggcgagggagcaccaactccaaactgacctgggccgtggctgcctcgtgagcctcccagagcccaggcctccgtggcctcctcctgtgtgagtcccaccaggagccacgtgcccggccttgccctcaaggttttttgcttttctcctgtgcacctggcgaggctgaaggcgaggggtggaggaggccccagcacagcctcatctccatgtgtacacgtgtgtacgtgtgtatgcgtgtgtgtacgcgtgtgtacgcgcgtgtgtacacatgcgtggccgcctgtggtgtgcacgtgtgctctgggctccgaggcttctccagagctgggagctggctggcgtggcaagggcatgctctggggcagtgtgtccctcaggaaccagggtcctccctcccctttctgcctggtcagccccgtggcctctggcccaccaagctccctgtcacccagccatggtgtggtccaggcagggacatctcggtaccctttctgcactccgtgggccctgggtgcgctgaggcctggaggcgtctacactggctccacatccacttcccccgcagctcgtgtgggcgctcgtccacaaacactccgtggctgagaggcagcggatccaggcagcgatgctgagccacctcctccgagccttcctttcacacagaccaccccggaggacacgtggatgatggggtcagagatcactgagctgcccctcaagggggcctggaacccgggtgctggggtcatgctgcctccgtggctccaaggtgagggtcatcttcacgagcaaagagaaccaataaagtgacaacgaacgtctgaggcttcc

SEQ ID NO: 296 - DNA, 748 bp, Homo sapiens
catcgcctcacacatcggcttcgactggcccggagtctgggtccacctggacattgctgcaccggtgcatgctggtgagcgagccacaggcttcggtgtggccctcctgctggcgctcttcggccgtgcctctgaggaccctctgctgaacctggtgtccccactgggctgtgaggtggatgtcgaggagggggacctggggagggactccaagagacgcaggcttgtgtgagcctcctgcctcggccctgacaaacggggatcttttacctcactttgcactgattaattttaagcaattgaaagattgcccttcatatgggttttggtttgtctttctggtcgtcagcgtggtggtggaaacagctgaagttttaggagacagcttagggtttggtgcgggccacggggaggggaccgggaagcgctggggcttgtttctgtttgttacttacaggactgagacatcttctgtaaactgctacccctggggccttctgcaccccggggtgaggcctcctgcctgcctggtgccctgtcccagccccaggtcctgtgcagggcacctgcgtggctgacagccaggctcttactccagccggggctgccagagcatccagccagcccagccctgtgaaagatggagctgacttgctgcaggggacctgatttatagggcaagagaagtcacactccggcctctcagaattcacttgaggttcaattaaatacagtcacaccgcccctc

SEQ ID NO: 297 - DNA, 3211 bp, Homo sapiens
  misc_feature 2617,2950,3010: n = a,c,t, or g
ccaggctggtctcaaactcctggcctcaagtgatccacccacctcagcctcccaaagtgctgggattacaggtgtgagccaccacacctggcctcatcctatttttaaaataaaataatttatttagaattcaaagaaagagtcttaacaactaaaaaaaaaaaatgaaaaaaaattatttattgtattttatgtcataaaaagaatctggaaaagttcagataaaattgcactgttactgaataagcaggataggtttaaaatttggcctccataattaaattcaccttaatgaatatttttagaaaaacggcattctttttcagagtgtcaccttgaagacatgtgtttattctttttttaaattttcccaaaatagctgctatgctccttgaaagtctaggggtaagcattttttatttgctatgtattctttatgtgattatttaaaattagtgtataaaaatggttttcttgataaatgtggcttatctaaattagtgttaagttttcttattgtgtttacatgacatattttttgacagtactgctgagaaatataaatattaatccccttgttcttgtactttcttttctaactatagttcttaaaattatagattggttctttcagttatttgttgaaggttacaaggaggctgaatattggcttaggaaatttgaagctgaccctttgcctgagaatattagaaaacaatttcagtcacaatttgaaagattagttattttggattacatcatcagaaatacagacaggggcaatgataattggttagtcagatacgaaaagcagaaatgtgaaaaggaaattgaccataaggaatcaaaatggattgatgatgaagaattccttattaaaatagctgcaattgataatggtctagcatttccttttaaacatcctgatgaatggagagcatatccatttcactgggcttggcttcctcaagcaaaagttcccttttctgaagaaataagaaatttgattctaccatatatttctgacatgaactttgtgcaagatttatgtgaagatctctatgaactttttaagactgacaaaggatttgacaaagccacttttgaaagtcagatgtctgtgatgaggggtcagatcttaaaccttactcaggcattgagagacgggaagagtcctttccagctagtacagataccttgtgtgattgtggaacgcagtcaaggtggaagtcagggtcggattgtccacctgagcaattcctttacccagactgtcaattgcaggaagccatttttttcctcctggtagtaaatgtcagagtaagagaaacaaactgtttagaattatcatgtttttaaaacatcatagtaatataaatctgctgttaggagctccagttgctaaaacctcaatttaagtctttaaaaggttgtattttgaatgtaaccaaaagtttacagttttttgtccaaatattaaatttctacttcagggaagaagtgctatatctcctatattgtatttttgtagaaaatttgtattttatgttgttgttagtttaaaaggtaattttacacatgctggaatgactgtaattactctagaattccaagtagaatacaataacttttaatattgagaagaatgttcatgctaattcttcttacattacaaaaggcctttgaggatgcctacgtctgaaattgctcttacgaactttaataaaatagttagctaatagaaaaacaggtaagaataaagcaatgttgccttaatttcaaaagctgctattttagaatttgaataagtactcctaaagtgaccattattagggaccagaaaattatatcttggctaagtaatagaggaccattttggtttttgtacttgagaatatttttggtgaattactttgttgtagtgaggaaaaaacctaagaaatttccccttttttttaaaaaatggaaatattcaattgagacttgaggggaataatagaaaattaagatagatccccaatattttggaataccaaaattgccttaaaaattcccttctgtttcttacatgggatcaaatacttgagattagtacttcagagtactggccttgttcaatttagtacttcaattagtattaaacttcactaaaaagtaaaccatactccaaattgtatattggattgcattttggggtcctaggtcatacgttcttcaaaattattatgattgtactattgtacttgaaattacagatgttattataattacagtcaaatgtagactatcaggccaaattaaaggggagcatggcagataaccataaagtcatttatatttgattttgaaatgtatttttgtactttattttgaatatcatccatatgtctgacattattggaatttgtaacattgttaatgcactaagtgatttaaattcaattgatgaagatgtgattttacagaagcagaagtttcattttcttgaggcttaaaaccaatgtcaccacttgggcttaactgggtaatttgtggtctaggccttttgttttctaagcttactatcttgtgtttgtttatttgcttttaatgaagtattttgtgtagaaggttaaantaggatgcaaaacagatctgccattcctttttcccttatatcttccttttggtcttcatggacgagatgaatgaggattctgctgccctgagggagttcattggaaacctgcgttctcctacctcttccaaccctccattagctcaattttgagataatggaaaattgactggaaattcaaaactcaaactactatctttagatataaacactagtaattaaaatgtgccttttgaagatgttttctaagagaaaggaaatacgttgcagtgatgtgggtactgctttcataaaacagttttttcagtattttgagaattgccatattaattntaataatggaaaacttaataaattgctactgttttatatcataaaattaaaataccatgntaatatttgcaaaaggtctggccataccagaaaagtacagttgagatagttaagatataaccacaagtcagagtacattggttgtattttgtaaactttcatgaactgaattcttatttaaatagtatggttttttttcaataagtatatttatagtgacaaatgtggtagactaaaggtaataaaaatcattgtcttaag

SEQ ID NO: 298 - DNA, 3479 bp, Homo sapiens
ggagaaaccaggtggtcctgcagagccctgcagatggcagggctggaggccgcctcacagtccctctaaggagtttgtctcccctgtctccccaccaagtcagaagctcagggaaggaggccctgggttgagcagccgaagccacagccaagagtcagggtcaggcctgttcccaaagtggcgtggggcgagggagtttgcagcctacagactggccctccagccccttcttccgaactgtggctgccccttggctgtgttcatcccatctggggaaactggccagaccaggacagactcacagacgtgcacctttggggacccgtcagttgggtgtgtatgacacagatatgtgcaaacatgttatatcccggaaattcacttcctgtgtcttgtccaggcagctacccccatgagggactaaaccaaggagtgagcctggtagagagggggaaggcaggcttaggcctgggcagcctgtcctgattggagaaggagccgggcctccgaggtgcacgtgtgtcacagagggccacagatggggaggtgtgtaggaggcaggcgggaagaaacgtggggctgcagtgggggcccagaaagagctggctgtagaagtatgtggtcagctgttttgttcatttatttccatatttgtagaagatgaacagatctgtctgctatgccggcagaagagtggtgtctgtttccactatccaacaggaaaatgtagacagaaaacactaaaaatgtggaggttccccctgggcagtgggattccagatctttttttccttgtgttttgtattttataatctttcaaaagtgagcatgtttttaatatacaagtaatagaaatttctcaggaaggataatgtgtggacggatggaacgccatccctgccggtgctggtggagactccgtcccccagggtctgactccagcctcgctagtcccggctgacggcgccccagccacccgagtggcgctgggtttctcctggaggacccacacgagatggtcgtgacttctcccaccacagcccctgggaacacgcccactccttccttgatttcccacctggcctatttgactcccttcatccactttaggaaaaggcctgtctgtggaagcggcgacctggggctgatctcaccacgggcgtcttcaaggagcctgtgtctgtgctgcagaccctcccatcattgtctgccccgccttctgtcggaggtggatgtgttctagaatcagcttgaatgtgatgttaccgttcacagtggaaggcagaggaaatcggccctgttcctagaaatgtgctttatcagagagtgtgtgttttcttaagggattcttataaaactcacttcagtttcctttctttccatattctgatgtgagacatttaaataaatgttcatttgctcatttgcctttataatagaaataacctctttctacttcacgagattttaaaaatgccacatgtgcattggaacaagttaagcagtgtggtgctggaagtgttaagattccctccccaccacctctcccttcaaccctgtaatctaagcaactgtttgaaaattgtgcttccttgtgctttttagttttggttaattgaaaagaaaatctcatgcctgtaagctcagcactttgaaggcaggaggatcacttgaagccaggtgtttgagaccagcctgggcaacaaagctagaccctgcctctacaaaaactgtaaaaatagtcaggcgtggtggcacacacctgtaggcccagctactcaggaggctgttgtgggaggatcccttgagcccaggagttcaaagctgcagtgagctgtgattgcactaatgcattccagcctggcgacagagcgagaccccatctcttaaaaaacaagaccaaaatatgggaccataatttatgcagcattattttacaactcgattttcattttcacttaatccaacaattacttcattgtctatgcttttttatcagccacggtattaacttgcattttttaatcatttcagtcttaaaatccttgcacgtttgatgactgccaaattcttgcatacagaaattcgagaaaaaggcggtgcttatggtggaggcgcaaaactcagccacaatgggattttcaccctttactcttacagggacccaaatacaatagagacgctccagtcttttgggaaggctgtcgactgggctaagtctggaaaattcacacagcaagacatcgacgaagccaaactttctgtcttctcaaccgtagatgctcctgtcgctccttcagacaaaggtattttgagtataacagtgagaatctcaacccacagcctcacagatgacgttgctgttttccaagttcccggcatgcatgggcaggagcaccagcttctggtgcctccatccttgcttgtgatacgatttccacgtctgacactctaaacacgcttcctgacatccgggcgagaagagtgcatcctgtcatttgttttactgacctgagacccagtggggccaacccatggcagtgtccgggctctttagggtggaaggaggacgtgggcacggcctgggcatggccacgttactctctggagccgcttttgctcacagcatcatcagcctcacgcggcgctgactgcatccctgctgcagaagcaggcgtgggtaggggtcagcgtggcacgtgggagctggaggtcggggtgtgatctctgggttgttagacacatccctgtggttgaaacatgcacgtgaaatgacagtgagatgcctgtgtcccctccgggacatgagtgcacagcccacaacgcgagctcccgggcagcggctccatcgtgcctgtggattgtcttctaggaatggaccacttcttgtacggcctctcggatgagatgaagcaggcccacagagagcagctctttgctgtcagccacgacaagctcctggccgtgagcgataggtgagtggggagcgggggagacagcgtctgggactggaagccctcgtgctgactctaacagcgtcacgcagaagccagtccttgctgaccacgcctgccttcctctcagatacctcggcactgggaagaaaacacacggcctggccatcctcggacccgagaacccgaaaattgccaaggacccatcctggatcatccgatgagcagccgtggcgctcgactgcacaggcgcccgagacaatacccctccgagctgaatatgaaaagtcagaaatgctactgctttttccaagaatattatgtcattgagtgtcgccaaagcccttgactggcgagtcaaaaactcagatctatcttaagagtgaccaggaagaggttcattgaaataatcatgcatgaagcgccaaagatgcaccatgtagaattttcactttgtactggcaggctcgttttacctcattctagaatatttaagaatctaaaaataaagggcaactctgactt

SEQ ID NO: 299 - DNA, 416 bp, Homo sapiens
gacacagacatgattgattatgaaaaggggggtattttaaaagttgaagattttgaaagaaaagccagggaagtgtgtgataacttggaaaacttcacctcaggcagtcctttcctgtgcatggatctcagctacatcacagccctgttaaaggatggctttggctttgcagacagcacagtcttacagtgctcttggacctggaagatctccctgtggtctggcccctttgccttggttgttaacctccagcttctttgcaggagtgtatttccccaaaacttgtggctttcacagtagactccgtttccatcctctctctcacaaaggatgttaagtatgcctggccctcacagtccatgggaaaccttatttttaacattactccattgagtcaataaatatttaccatctgc

SEQ ID NO: 300 - DNA, 259 bp, Homo sapiens
cggacgcgtgggcggacgcgtgggcggacgcgtgggatttgaacaaagaactgggactggtgacttgttaatgaacagttcagagggcagagggccatcatctcagcttgtggagacctttctttccctggatgctgcttctcagctaactccctctctcttcgtgtgtgtactcggccttcagggtttccaccgatttttacaccttcttcccaccacgatagcttggctttaatgtggaattaaattatatattttt

SEQ ID NO: 301 - DNA, 2968 bp, Homo sapiens
ctgcattggaagtgtatgctcctccactctcttgtgcttttcctgtaccctctgaaccaggcagtctttctttttactaggccttgaaactggcttttctttagtcacctcgtggtcaggacatgcactgttcaccagcttttcagtcctgattagccagcctggcccagtgtggcaggcaggaccaatggttgcccaggtgtgctggacctgagcagcctaggaggcccaccttccttccttttatctcctggactccttgctgtgtatggaagcatgtcagaatcatagagattttgtcttcttttttgcccatttcaaaaattctagatgtccaactagccctttgggcactaaaatcaaggttcctttggatgatgttgaattaccactcatgctatggcctctgcccattagaaaagagcttatcctctgttttcccctgcaccattccaagcccaaattctggcaggaccctgaactctccaggcttctgacacctctgtgcctttgcaaatgctagcctcattctgcaaaatacctttctctttgctcactcttttcccccctcccaggctcatttaaattctttcatttttggaaaggctttcccctctcctcctgtttggtgcacccctccattgaagcacaaatgctgctgggttgtagttaatggctgaattaaggcctttgaggctggcaatgttgtatttacctctctgtgttcagtgctagatgctgagtaggtgctgagtgcatgatgaaagaaagtgatacagggaagaaggtaagagagcaggaatgaggaagaggacccatccttcattcccagagccatgcatcatgggatccccaggttactcaccttctcttgaaaactttcaccccccctccccctggagctggttcccttttccttgtgatgctttgctctgaaagatcactcagtcgttcagcagtcctcctgatttctctctcaattaagtgttcatctctgggctgtgtcctccctgcaggagagattgctgtcagacaggcaatcagtgagaaccccaactgagccctacctcccttaccaaagaagttcatggccaagccatttttatttagcaaataagggcttgttttccttgattgtccaaagcacaaggggagaaaaaccacccattggcttcatgtttacctgcactgcggggctgtcttgtctgtttcagttctgtttcacatgtggagttttcactgatttcaagaaggaatgtatgcatggagttgagcaggatacagtatcctgaatgagggctgaatgttctgcactagaagtgagcgtatcaagtctttgtaactaagaatgtgatgttagattgtagctgaggggaagaaacacaaatggcttgggttgtatctaaatcctgggtctgccaggtgaaaacttagatgttgctttcaaatgacactaatgatttctttcagtgctgtttagcatgagtggtcattgcaaagagctgtgaccactgtactacccagtatggtggctactggtcccatgtggctcttgagcacttgaaatatgggtaatctaaatggagatgtggaaaatacaaactggattttaaagacttagtagacttagtattttgaaagagcaaaatagcccattgacaattttatgttgattatacatacattaattttacttgttatcttttaccatttttaagtgcagctactaaaaatttaaaattctgtatgttgcttacattatattgctcttggacagcactatactaaaggcataaatgtaagattgtgttcagagggcaccgagcactgcttggtttatatgtattttctaggccttcctttggttccctggttacctttaaaaatacatgtcatgatatagacatggcatatctgagacaaaccttggactgagacaaacctgagtttcaatctcaattctttgtttgtggcttgcctctcagcatcttaaattctctgaatcttaagttcctccactgtgtaaaagaaataatatccctctgacctcactgtggttaggcaagagacaatgcagtgattttttcagtaatattatgagacattttattactataattaaatgattgtattttccccagattgacaaattcaaattttctattttgaaatcttattgcaaatgttaaaaaaacaaacaacccaccctttggctcctgttatgttgtcttccagctgctagtaatggaattgggacagctaatgttccctgagagccatggggaaccaggcagtgtgcttttcaggaactgtcttactttatcctcacaacaatcccaaaaggaaaaacctagttttatctctatttaatagctgcagtgactgaggcaccgcaaggttaggtgacttgcccaaggtcacacagcgaagcattgagcccgggcagtccagctctagagccgtgttctttgcctccgcccaatattgtccaccagtgaggagaagacggaaccaaagaaccaacagtgaatgaatactaacaggaatcctggctttcatggacatctattcttgtgatttgacagtgtatatgtgagatacttcctcttagaatgctttttctaattcatacagtaggcttaaatatgtcatggttttagagttttccttaaggaatacgttgattcccaggcacattacagtctgaatcagtcttaagaaattccaggatagaggtggaagaagttttagtaaattgttgtgcagcatggtgaccgcagttaataataatgtattatatatttcaaaattgctgaaagaggagatttcaaatgttctcaccacacccacacacaaaaaaaaatgataagtaggtgaggtgatggatatattaactagcttaatttaatttttctcaaaatatcacattatacttcataaatacattcaattattattagtcaattgc

SEQ ID NO: 302 - DNA, 2023 bp, Homo sapiens
ggagaacgccatcagctcgctgcttaaaattaaaccacaggttccattatgggtcgacttgatgggaaagtcatcatcctgacggccgctgctcaggggattggccaagcagctgccttagcttttgcaagagaaggtgccaaagtcatagccacagacattaatgagtccaaacttcaggaactggaaaagtacccgggtattcaaactcgtgtccttgatgtcacaaagaagaaacaaattgatcagtttgccaatgaagttgagagacttgatgttctctttaatgttgctggttttgtccatcatggaactgtcctggattgtgaggagaaagactgggacttctcgatgaatctcaatgtgcgcagcatgtacctgatgatcaaggcattccttcctaaaatgcttgctcagaaatctggcaatattatcaacatgtcttctgtggcttccagcgtcaaaggtgggtctgtctccttccgaggactgcgatgctcatacacgcacatcattaagagctctgcgttcgggaacaggcatagcagagattataatttcaagtattgaaatgattgcacaactgctttttcgcaaaattggcattaagttccttaaccacagatcttctgctctcgatgtgagccagtggtcaaattaaattaaaatgtggggtattcctgccctcccttttattctttctaatggacatggaaatgaacatcaaactgggagaaagaaccatttaacatttaattaatttaaaatagtgtattgagcaccggtatgtgctctggccataaaagaattcacagtccaaaactaggagcaaggcagcaaacatcatcttctccagtgtgatgatatataacagaggtttgtcaaagcgctgtccaaatacagggaaataactgcctgtgagtttgtggaatgcttcacaaagacagttgatctgagccatcagcaataagtcaagctgtaggacatggacagcagtgcaaaatgtggattatgtcacaatctggcataattggatctgtgagtttaaaatgaaatagttactgctgagataccatttcttctctttgcaaggatcacatattcaacatactcaagagaaggaaggatagaagtgcctaggcctcctgtctatggattcgttagttattaatctccatgttctttgggaatctgcctaagagatatggcactgatgatgagaactctaagactaccaatgttaagtaagtccagcatttcaattaagtctcaattaagtggtgcgcagtcagatattatttccctagatccagaaactgactctattgaaggaaaacaatcatgatatcaatcttttataaatgggcggaatgtggagaaagcatgaaaatggctactgggaacacttatttgtgttacctttctgaaggaaaatacattttttattccttcaattgttgaacctttcctccaccctcaggagttgtgaacagatgtgtgtacagcacaaccaaggcagccgtgattggcctcacaaaatctgtggctgcagatttcatccagcagggcatcaggtgcaactgtgtgtgcccaggaacagttgatacgccatctctacaagaaagaatacaagccagaggaaatcctgaagaggcacggaatgatttcccgaagagacaaaagacgggaagattcgcaactgcagaagaaatagccatgctctgcgtgtatttggcttctgatgaatctgcttatgtaactggtaaccctgtcatcattgatggaggctggagcttgtgattttaggatctccatggtgggaaggaaggcaggcccttcctatccacagtgaacctggttacgaagaaaactcaccaatcatctccttcctgttaatcacatgttaatgaaaataagctctttttaatgatgtcactgtttgcaagagtctgattctttaagtatattaatctctttgtaatctcttctgaaatcattgtaaagaaataaaaatattgaactc

SEQ ID NO: 303 - DNA, 1746 bp, Homo sapiens
gggctaaactctaccactgaaggtgagggaagagacaggcaggaaacataacagtggttcagggaagagctgttacttaaacccaggccttctaactcctgctctaacataatttcctaaactgcaagctacatccccctgacatttcaatctaggatacacatagcctcactttttatatttgctgcaagctactgttacctcagttaaagaggttagtccaaggctaaaaaaaccccacatattttaagtttcctgtttccttccctcagagttgcataagtatcagaaaatgttagaaccaccaccctcagccaagcccttcaccattgatgtggacaagaagttagaagagggccagaagaatataaggctgttgcggacagagcttcagaaacttggtgagtctctccaatcagcagagagagcttgttgccacagcactggggcaggaaaacttcgtcaagccttgaccacttgtgatgacatcttaatcaaacaggttagggcaaactatatacccacttctgtcctaccagcccactccagtgtatatgtgagaaaggaaagaggaccagaagaaaaaggtaaagatttttaggctgaatttatagtgagagcagtatatttgcaaaataaaaataactattctttgttaagcatttactaagtaccaggcactgtgctaagtaatttataggcattttctgtcacaaccaccttagggaggtagttactgtcatatttcatctaagatgctactgattataagaaaccattattttatgtactactgagaaaaaagtaacaatttctcatcagtaagatgcatcctgattccaaagagattagaatgttaaaattgtgtatcttaaactaactcacatttaatttgacgtttagagactgaggcacttagaaattagatttactcaagctcatactcccttatgtgttagaagatgtcctattcggcactgcttatgttttgttctcagaaaatgtccccttattcagttataagctccgaccttaaagagttttaatctttgaagacacagttgttagtaactagtaatggatggtatgtattacctttagccctctcgtttctctaatataccagacaaaagtgttttctataactttattgatcttccttaggaccagactctggctgaactgcagaacaacatggtgctagtgaaactggaccttcggaagaaggcagcatgtattgctgagcagtatcatactgtgttgaaactccaaggccaggtttctgccaaaaagcgcattggtaccaaccaggaaaatcagcaaccaaaccaacaaccaccagggaagaaaccattccttcgaaatttacttccccgaacaccaacctgccaaagctcaacagactgcagcccttatgcccggatcctacgctcacggcgttcccctttactcaaatctgggccttttggcaaaaagtactaaggctgtggggaaagagaagagcagtcatggccctgaggtgggtcagctactctcctgaagaaataggactcttttatgctttaccatataacaggaattatatccaggatgcaatactcagacactagcttttttctcacttttgtattataaccacctatgtaatctcatgttgttgtttttttttatttacttatatgatttctatgcacacaaaaacagttatattaaagatattattgttcacattttttattgaattcc

SEQ ID NO: 304 - DNA, 1774 bp, Homo sapiens
  misc_feature 1642: n = a,c,t, or g
ctaatttgtggaaaacgttattacctttatcgttttggtggtaacggtgctatcagtttagatacatgctgtagaaatgtgttgcttgcattctggactatcttattttatgctaacgttaattaaagggttaatttacaatcttgaggatcttggtttagaggctatgtgcaagttttctacttggttactaatgcctttagaagaaaaaagatgcagatatctaattataatgatttttattaggtttggtgccattgtgtggcaatttttaaagagattatttcagtcttgtggtagagtgtcatcatacaaagaaacgcagttacaaaacatgctgcaatccactaaacccataaactctagatctatgtgaggggatgagaaagttagatgaatatgataactgggcaacagaattagatttcaaaaaagtttaggcctcccccactgacttctccattgctttttctcctcttcactaactttgttagtggatgtcaaaacaagagacaatatatgaggcattttttactctttaataaagcacaatgggagaatttagggatgtggaaacaccctctcccattcagttagagacctcactggctccacctacattccatggcaacctggtagctttggtttgtcacattctcccacatcaccgcaaaaatgaccctcccaaggtaagataatgacactgtaatgagaagagtgcactctagagcagcatcaagctaaatatagaagcaaggcagtgcctagggtgtcaaggaagtgagtgccagttaatgtggcctgtacagggtgaggaagtgagaaaagtgaaatgatcataaacagtattgtccccagaaatgatggcattagtatacacatgcacactgagacctttgggctcttagtttttgtgaccaccacactggatacctggcctaaaatcccaacacagtttccaccacagtgatgaatgtacctagtatttgggaaagcagatggtgttccctgaccttacagagaatcacttctgctaataaaatccaagtaaccagaccacacagtggctctttgagagtgcacagaggctctgggtcctacagctgggcgtccttttgttgagcctagggagactaacagaaactttccaaatggtcatggcagtcatttgtgagagcaactctatgtggatggactatctcatagaggaaagagcctcttcagataactgtataagttatattttctggaagaactagaaaataagacttctccatctttaagtcaaactatgggctactatcagcatgtcaccctcccacagtcatgttttaacttgttcttcctcctgcctcctgcagctgtgtgtcttgggatctgacccttttccatcttcatctgataatgacaccagattatgtcataacatcctcagctatcacgtggttaaaattagagtgagacagaattatgtcagttaaagtcaaatgagattttaatctgaatttgcttcttggcgctgttcttaatctttatttaatggcagtaaaaagcctctcttccttctcctacattcttgccagaattgaaatctctgtcagttcactttataaaaattcattgtgtagagttttaagtcctnaggtgagaggattgcttgagcctgggaggttgagactgcagtgagccatgatcatgccattgcactccagcctaggtgacagagcgaggccctgtgaaaaaagaaaaagaaagaaggaggaaagaaagaaag

SEQ ID NO: 305 - DNA, 677 bp, Homo sapiens
cagaatcttttagcatttcatctgttttattgaattttttgttatacttttgaatgtgtgtggcgaggggtggagtgttacatggttgctctggagcggcccttctcagctgaggctctatagagagaattaagccctaactcccttaggcatccattatatccgcagtgaattaactcctctcctgtgaatctgtgtgctctccttgggagaactgagcagatatcactgaaaatattttttgtggggcttagtcatttcccggaaccctggatgaaaagggctgctccaaagattacaatgtgtaactttaacttgtcctattctactttcaaataataatatgatacttaatggacaatataagaatcttatggcctggggcggtggctcatgcctgtaatcccagcagtttcggaggccgaggcaggtggatcacttggggtcgggagttccagactagcctggtcaacatggcaaaaaccccatctctacaaccctgtctctactaggggtgcaggggttggccgggcatggtggcgcacacttctagtcccagctgctcgagaggctgaggcggaggaatcgcttgaacccgggaggtggaggttgcagtgagccggggtcgtgccactgcgctccagcctgggcaacagagcgagactccatctcaaaag

SEQ ID NO: 306 - DNA, 1315 bp, Homo sapiens
aagagcacatgttggtctcctcttagtgtgaacgagattgccaggcccttttctcctatgcacaccaggatagacaaggcaggggatactggcagcctgcatcatcctcccattgggctgacagctggccctactttcctccctctgctgcttggtccctcaccttgatgatgtggcttcgccccctccactctactgccagtgttctcccaggggttgctaaatccagcagacccctttcctgtcttactagatctgggcagcatttgacatggctgatcaccccttgcttcttggatggcacttccctggcacctctgtggctagttgtcctacctccctggctgttcctttcaggcttccgtgcaggcttctccacttgcccatgcacagtagggtctttcagggttctgctgtgggctccctagggaagcccatccatctggatggtttcaaggatggtgaggaatttagagttgacctccagccccaacatccttcctgatcacctgaaccacagttttgctgccctctaggtgcacagacaattcaggtccatggcccagatggtacttgctgtcttctgcaaacctgccccttctgggtacttcccttgaccccgagatcactcaggagccagacaggaaacttattctattcctgttttctctttctgcccaccacatccaatctctcaaaacggtcaggtctaccttaacatctcttgatttgagccactcccactgtcatcagctttcacctggattatcgtgacagcctcctactgcttctctatcatgtggccagagctatcttcctaaaatgcattgcatagttgatcaagtcactctctggcctaaaaccttccttggctccctgctgccctcaggataaagtctggacccctcagcatggcttgtgagactcatggtgtccttgtccctgctcacctctctggtctcatcacttgccttcttgcattctgggtcccagcctcctgtatccagagatgcagtggctctccattgccactctgattcctcctttcttttggtcacagagaaagggtactttctctgtcaaatctcaacttagacttgacttcctccaaggagctttggctatactctctcctcccgacccccaccctggcatactacacagatcactctgggctcacttgcctgcctaatggtcatctccccagtagactgtaagctccttgagggcaaggattgtgttggaatttttgtattaacagtgcctggcttggtgcctggcacctagaaagcactcaataaatgtttgtttaatg

SEQ ID NO: 307 - DNA, 950 bp, Homo sapiens
agttaatgggaagtctgttttgtaggaaacctgaaaacattttttcatgaagcttatcctgtataataatataacatgatgcagctttaatagactaaatctaaccttgacttcttaagttcaacttcattccgtgcttctcagcctcttgttacaattaatgcccattaactggtaacttctgaaactaaccgagaggcttttggaatactgtatttaatctctgccctacagcacaagcagcgctgccctgtgctggaggaccagttggtggatctggttgtttatgccatggagcgatctgagaccgaggagaagtttgacgatgggggaacaagccaactcctgtggcagcatctctcaagtcagctcattttctttgtgcttttccagtttgcaagttttccacatatggtgctttctcttcatcagaaggtatgtactaaatcttatggtcggagtgacttcacctgttgattactgtattttagactgctgtgggcattccctagtgattttagaactgacggaagttctgagccctaatttctgtcctgtttagtgcttttatagtttcttaactttttactttcttgtcactgtaaaaacaggattcagtcattcattctatgtattctcagtgcaggcaccagcagatacaagatgaaaaggcactgtaatatcctcaaggagcacctcactagaggaggggatactttatatatatatatatacatatatatatatgtatgtgtatatatatatagagtacatatatatatgtatgtatatacatacacacacacacaacatgattatatcttaatagttgttataatgaaagcacatttccctgcaatacaaataaaaggtaatagtccctaaggttgcagtgagccaaaatcacacgactgcactccagcctcggcgacagagcgagactctttttc

SEQ ID NO: 308 - DNA, 1947 bp, Homo sapiens
  misc_feature 1947: n = a,c,t, or g
agtcagaatacgttcttagttatattctcaatactgaggaatttttacttgtagaaactgaaggctcggaagaggatgataaagaaaatgataagactgaagaaatgccaaatgattcagtccttgaaaacaaggtatgttgttagccactcagtactgttgtcagcctttttctgtttttgggagactggagctcactcttgttgcctaggctggattgcagtggggtgatcatgatcatggctcactgcagcctagacccgggcttaagtgatcgcctcacctcagcctctcaagtagctgggactacaggcttgtgccaacatgcccagctagtttgcaggactgtagcttacctagtttaggcacgattattatttttttaagagatagaatctctgtctctgcccaggccggagtgcactggcatgatcagggctcactgtatctttagcctcctgggttcaaggaatccttctgcctcatcttctcagatagctaggtctccagatgtctgccaccatgtctggctaatttgttctctaattttattttgtttagacggctgtcttgctgtgctgcccaggctggtctcaaacctggcctctcagttattctcctgcctcagcctcccaaagtgttgggattataggcataacccaccatgcccagccctaggcatgattattatagataactgtctcttggttatggattagggaccctttattcatgcctaggatgggtggatatatttgatcctggggttcttgtgtgttagtatgtgagccaacattcactgttaaaatatcagtgacatggtcatgacttaagacagtatgtggacccattctctagattttagggagaaagtccaaattttgaatcgtatatcaactttttttaagctacgctaagttatacatttagatttgtatttgaaaaagatgcctatctttatattatttggatatactttagtctcttcaagaaaatgaggaggaggagattgggaacctagagcttgcctgggatatgctggatttagcaaagatcatttttaaaaggcaagaaacaaaagaagcacagctttatgctgccaggcacatcttaaactcggagaagttagtgttgaatctgaaaactatgtgcaagctgtggaggagttcagtcctgccttaacctgcaggaacagtacctggaagcccacgaccgtcttcttgcagagacccactaccagctgggcttggcttatgggtacaactctcagtatgatgaggcagtggcacagttcagcaaatctattgaagcattgagaacagaatggctgtactaaacgagcaggtgaaggaggctgaaggatcgtctgttgaatacacgaaagaaattgaggaactaaaggaactgctacccgaaattagagagaagatagaagatgcaagggagtctcagcgaagtgggaatgtagctgaactggctgtgaaagctactctggtggagagttagacttcaggtttcactcctggtggaggaggctcttcagtctccatgattgccagtagaaagccaacagacggtgcttcctcatcaaattgtgtgactgatatttcccaccttgtcagaaagaagaggaaaccagaggaagagagtccccggaaagatgatgcaaagaaagccaaacaagagccggaggtgaacggaggcagtggggatgctgtccccagtggaaatgaagtttcggaaaacatggaggaggaggctgagaatcaggctgaaagccgggcagcagtggaggggacagtggaggctggagctacagttgaaagcactgcatgttaagagggggcacagccctcctcccaagggaaagtgtttttgtatataatgtattttttcacttttgggggttttatttttttttaacttcaataaaggttgttagcaaan

SEQ ID NO: 309 - DNA, 2322 bp, Homo sapiens
gatacactcagcttcccattgctgagagctcctgctgttgattggggaaaaggacacctcttctgctgggagtgccttggtgaagcacatgagccttgtgactgccaaacatggaagaattggctgcaaaaaataaccgaaatgaaaccagaagaacttgtgggagttagtgaagcctacgaggatgccgccaattgtctctggttattaactaactccaagccttgtgccaactgtaagtctccaatacagaagaatgaaggctgcaatcacatgcagtgtgctaagtgcaagtatgacttttgctggatttgccttgaagagtggaaaaaacatagttcgtccactggaggttattacagatgtactcgctatgaagtcattcaacacgtggaggagcaatccaaggaaatgactgtggaggctgagaaaaaacacaaacgatttcaggaacttgacagatttatgcactattatacaagatttaaaaaccatgagcatagttatcagctagaacaacgccttcttaaaacagccaaagaaaagatggagcaattgagcagagctctcaaagaaactgaaggaggctgtccagataccactttcattgaagatgcagttcatgtgctcttaaaaactcggcgcattctcaagtgttcttatccatatggatttttcttggaacctaaaagcacaaagaaagaaatttttgaactaatgcaaacagacctagaaatggtcactgaagaccttgcccagaaagtcaataggccttaccttcgcacaccccgccacaagatcatcaaagcagcatgccttgtacagcagaagaggcaagaattcctggcatctgtggctcggggagtagctcctgcagactcaccagaagctccaaggcgcagctttgctggtggaacatgggattgggaatatttaggatttgcatcaccagaggaatatgctgaatttcagtatcggaggaggcacagacaacgtcgtcgaggagatgttcacagtctactcagtaatcctccagaccctgatgagccaagtgaaagcactttagatattccagaaggcggcagcagcagccgcaggctggcacatccgtggtaagttctgcatctatgagtgtgtgcacagctcttccctgcgtgactacacccctgccagtcgctctgaaaaccaggactctcttcaggctctgagttccttggatgaagacgatcccaatatacttcttgcaatacagttatcactgcaagagtctgggctggccctcgatgaagaaactagagacttcctcagtaatgaagcatccttaggtgcgataggcacttctttaccttccaggctggactctgtccccagaaatacagatagccctcgggctgcattgagcagctctgagcttttggaacttggtgacagcctcatgagactaggagcagagaatgacccattttcaactgacaccgtgagctcacaccctctcagtgaggcaagaagtgatttctgtccctcatctagtgatcctgactcagctggccaggaccccaacatcaatgacaatcttctcggcagcatcatggcttggtttcatgacatgaaccctcagagtattgccctgattcctccagcaactacagaaatcagtgcagattcccagctcccctgtatcaaagatgggtcagaaggtgtgaaggatgtggaaatggtgctgccagaagattcaatgtttgaagatgccagtgtcagtgaaggtagaggaacccagatagaagaaaatcctttggaagaaaatattctggcgggggaagcagcatctcaagctggtgacagtggtaacgaggcagccaacagaggagatggttcagatgtttcaagtcaaacacctcaaacctcaagtgactggcttgaacaagtacatttagtgtgaactgcacacatctgggctctaaatgaattacaggtacagatggtatgctaggtggagtatgcttgatagagactttgattcacttaattccaactcagtgataaaccactgacattagggttgaatacagagaagttcccttgaatggtagcttcattttttattttaacttacagggaatttcctttgtacttaattgaatagcttttcccctttttgctgacaaaaagaagagcaagagaaagagaaacaaaaatgaaataaataagttgtattccacactctaagaaaatgcagtcctctatttagcctaggcttgacaatacttaaattgaacatttaaactaaaggcttactccctaatctttgggtggctttccttt

SEQ ID NO: 310 - DNA, 1898 bp, Homo sapiens
gggaaattactctgcatactgttgctctgaatcccagtcctgatagctctgagggactgattcttagggctggtgactgggatcttagggtctaaggttatggatgagttcttgaagagcagagatttgcttccccactctctcacctattcactgtatccaaggacctattggctggtctttcccctccttaggggtggtctgaatggagaactagtttcctttgatgccttcaccttctgcacctcagactggacttcaactcctcagcagggatgctatggggtgtggggacaaacacagacactcagttctgctctttaggggctcagtctgaatctgcccagagcaagatgctgagtggcgttggaggcttcgtgctggggctgatcttccttgtgctgggccttatcatccgtcaaaggagtcagaaaggtgaggaaccccaggggaaaaggggaagatgggctgtgacccagaccctctgttcagagtggtcctgtctgtagattaactctttcctcctcaccctgagaggaagtgcgaggagacaggacaaagatgggaggaggcattggaatctgattttactggttgaaaggtagcgctgtcacagagctgactgattgagcttattcagggcattcctaccattcatcattggctcactgctcctttccaaaagcttcctccattaagaagggtcagagcatcaacttctttctttctagtgacaatttcctttgttttaggggattttaaattagggtgctgaaaggccatgaaagaacatgggtgggaagagaatgtaacttttaagtcatgtgtgtcattttcatttggggtgagagagtgacatgtttgtgtaatgagacctttctctgcataaattcattttgtaagacctcaagggcctccaccagcaggtaatatttcagccatgatccagtgtgggtaggcgcaggtataatagagaagagcatgagctgagtgtaccagaccacagtggtccatgttgatgcccaatttgctgctatgaggatcaacatttagcgtataagtatgccagtctctagggatctccagacattgttccccagaaccaagccttaactttggtggcatcttcttgtgaaatgtggagccagacccacagcttaaatgttagacactaggatgatgcccactttgtgccacatgatggtggctactgcctgtaggcattttccagtgactaaaagaggctgctagtggtcgggaagagatatcatccaatttcctaaaaagactgaacccttcatattccccagaagaataacagctgttccccacctccctcacatctgcatcaagctgaagttctgtgtcctcatgagctgatttcacctttgcacagatcttgggggaggtgatgacaatacaccctggacctcaactttctctgtctgaagctgcagggggccgctgaagggtgggggagatggcaggcccaccaggataccctgtgctgatcaatgctcttctctcttctccagggcttctgcactgactcctgagactattttaactaggattggttatcactcttctgtgatgcctgcttgtgcctgcccagaattcccagctgcctgtgtcagcttgtccccctgagatcaaagtcctacagtggctgtcacgcagccaccaggtcatctcctttcatccccaccccaaggcgctggctgtgactctgcttcctgcactgacccagagcctctgcctgtgcacggccagctgcgtctactcaggtcccaaggggtttctgtttctattctttcctcagactgctcaagagaagcacatgaaaaacattacctgacttcagagcttttttacataattaaacatgatcctgagtt

SEQ ID NO: 311 - DNA, 1808 bp, Homo sapiens
  misc_feature 801: n = a,c,t, or g
cccacgcgtccgggataagcttttgttttttaaatgactgaagtgctataaatgtagtctgttgcatttttaaccaacagaacccacagtagaggggtctcatgtctccccagttccacagcagtgtcacagacgtgaaagccagaacctcagaggccacttgcttgctgacttagcctcctcccaaagtccccctcctcagccagcctccttgtgagagtggctttctaccacacacagcctgtccctgggggagtaattctgtcattcctaaaacacccttcagcaatgataatgagcagatgagagtttctggattagcttttcctattttcgatgaagttctgagatactgacatgtgaaaagagcaatcagaattgtgctgtttctcccctcctctattccttttagggaataatattcaatacacagtacttcctcccagcattgctactgctcagcttcttctttcattctaatccttgctattaagaatttaagacttgtgcttacaatatttttgacctggagtggatctatttacatagtcatttaggatccatgcagctttttttgctttttaagattattggctcataacgcatatgtatactggtttatggaactttatttacactcctctatcatgcaaaaaaaatttgactttttagtactaagcttaatgtttaaaaacaaaatctgtagtgttgacaaataaatagttgctcttctacactaggggtttcacctgcaggtttgcacgcaggtgctcgcttttctgcctgtcaagcttctctggnctggcgtgaggtgtgaaagaagtgaagcagcttccatgccgggtcacagccagtagcctaaatctccagtacttgagctgaccattgaactagggcaagtcttaatgtttacatggagttgaatttccagccctgcgggtaaacagattgagcatggctctctattccctcagcctaagaacactcatgggaatgcatttggcaacccaaggaaccatttgcttaacgtggaacatctcacctttttaaatcctaaaaaacactggcagttatattttaaattagtttttatttttatgatggttttatcaaaagacttttattattagattgggacccccttcaaacctaaaaatcaagttatttccttttataatacttttcttccccatggaacaaatgggatcaatttgtgagttttttcctttaatgataactaaaatccctctaatttctcattgatgcttttgtcttttttatgaaatatttcttttaaaagccccagtctcacctacgaaatatgaagagcaaaagctgattttgcttacttgctaaactgttgggaaagctctgtagagcatggttccagtgaggccaagattgaaatttgatactaaaaaggccacctagctttttgcagataacaacacaagaaagctattccaagactcagatgatgccagctgtctcccacgtgtgtattatggttcaccagggggaactggcaaaagtgtgtgtggggaggggaagggtgtgtgagtggttctgagcaaataactacagggtgcccattaccactcaagaagacacttcacgtattcttgtatcaaattcaataatcttaaacaatttgtgtagaagtccacagacatctttcaaccaccttttaggctgcatatggattaccaagtcagcatatgaggaattaaagacattgttttataaaaaaaaaaatcatttagatacacttttttgtgtgatattaaaaaaaatccaaaaaaaatgtg

SEQ ID NO: 312 - DNA, 2589 bp, Homo sapiens
  misc_feature 637,1872: n = a,c,t, or g
gatgaattgtgtcctctactagcttcctgagaaggtgtgcctcttttttcagtttttgcatatctaaaaatatatttatgcgaatgatagtttggctgaagtacataaaaataattcccatgcagtttttaaaatgttgtttttactatcttcttatatccagtatttgtattaagtctaatgcatgtcttgctccagtttcttggtattttggttactttttttctttttggaaactttagtgattatctctgtcactggtgttttgaaatcgcatgatatgttcacccatccttttttcattcattgtattaggcatctgacaaacctttggagtttggagatttctgtttgggagaagttttcttgtttcatttctgtggtaaatgctcacttttattttctgtgttctcctttttttaagaaactcctattgttctgacattgttctgacactgagcctcctgcatcaactcctttttttttttttagctcatttaattgtatgttattttctttctggcctttcatctttttgtttttttgtttcaatctttttaaataattttctaaacttaattacttattttagttgccatatttgtaattttgaagagctctgtaactttttatttgntctttaattctcttttttacagtttttgttactggttaatggatataataacatatacctctttggagatattaaatattgatatatacttttttcttttgttcccagcaatgtatctgatgtctccaagcccctttctttattcctttttgttttttttggtatttttcatgttaaggtatgtcttttgttatgtggtgatccttacccgcccatacataattaaagaatgaggctaaaataatcattgaaaaccgtatgtgtttgaatggagacagggctgtcttgcatagccattcaggttgaacactgcagaactcctgcggatactatttaaatatatcctttgtagtctcaaaaattactaatgtttaccatattagaaattgaaataatgatattttaaaactattgtcaaaaataaaaataataaatatatgttaacataaatcacattttttttctgaaaaataactattttccaaagcaacagaaatttagtgagaaagaatggcttgattttacacttttgcatatttctttaatgtcaagcttagtagaaaaaaattggattctcatgtttctgaatccaatctgttgtgatacattcttttggttgaaatgtatgaagaatacccagcctcacccagtacttcaataatcttttccaataattgtgattattctcctttgatactgcaccaaaagtggaagttttcttgcttgttgcactgtggaatctagctccgtatcactgactttttttgctttgttacatcaaaatctgtttgtctgttttatattttgaatggatcttttatccatgcctaattttgtaatatcatgcattggtcatttggaacttattggccccttaagtgccctggatcttccaaatgttgaaatatttcattatataatatcaagcactcacagtaaatattagcattaatctaatcagtggtgggtaggagtttttgcttgattttattactggaaacgaatactgtcagttgttttccttgatatgacaggctcactttgttaatttttcaaaaagaaaaagtctactgaaactctagtctagatattcatagtttgacagtcattctttaaaataaaaatgatcctgttctatgaaaaaaatgtggttaagtacaactcacaactcaatcacagacccaaatattttcagtaggcaatggttgtgacttatgcatactttctttgcattntgtcacacaaaatattaaaaagatatgagctcaaagattgagatttaataaagttttttttttaacttgtctcggtgtggtgtgaagaatacaatgtgtatggtggtgaagaatacaatgactactagtacaggttgctactgccttgatttatattaatttgccaccatttttacacacttctgtttttatgccaagagttgtgacttcagatgcctcctgaaagtggcttggattctccaggtgtccatatgtcatactttggaaacggatgatatgaattacaatgtgttgccctctggatttgtgcactgtactgtgtgcacagtctgcatgaaaattgcgtagacttcagtgtgggaaaattaggtgctgaactgactgattctttgttgaggaggatggtctcaacatcattatggagaggccaggtgtggtggctcatgcctgtaatcccaacactttgggaagctaatgcaggaggatcccttgaggctgggagtttgagaccagcctgggcaacactggagacttcgtctctacaaaaaaaaaaatgtttttaactagccagtcatgttgagcacatactgtgtagtcctagctactcaggagactgaggtgagaggattgcttgagcttaggagttcgaggttgcagttgagctatgatcatgccactacattccagccttggtgacagagtgagatcttgtctctt

SEQ ID NO: 313 - DNA, 1757 bp, Homo sapiens
cgcaccacccagatcccggggtgcgcggagggcgcgtctctgacggaagccggggcggacggtcggagtccggaagaaaaacagtccgcgacagctaggcgcgtgagaccggccgcccgcagggctgctctggccgggacccgctggccgggagacgcgaacctgccggaccaccgcgcggggacgacggcggccatgagctcgcggaagctgagcgggccgaaaggcaggaggctcagcatacacgtcgtgacttggaacgtggcttcggcagcgccccctctagatctcagtgacctgcttcagctgaacaaccggaacctcaatcttgacatatatgttattggtttgcaggaattgaactctgggatcataagcctcctttccgatgctgcctttaatgactcgtggagcagtttcctcatggatgtgctttcccctctgagcttcatcaaggtctcccatgtccgtatgcaggggatcctcttactggtctttgccaagtatcagcatttgccctatatccagattctgtctactaaatccacccccactggcctgtttgggtactgggggaacaaaggtggagtcaacatctgcctgaagctttatggctactatgtcagcatcatcaactgccacctgcctccccacatttccaacaattaccagcggctggagcactttgaccggatcctggagatgcagaattgtgaggggcgagacatcccaaacatcctggaccacgacctcattatcttggtttggagacatgaactttcggatcgaggactttgggttgcactttgttcgggaatccattaaaaatcggtgctacggtggcctgtgggagaaggaccagctcagcattgccaagaaacatgacccgctgctccgggagttccaggagggccgcctactcttcccgcccacctacaagtttgataggaactccaacgactatgacaccagtgagaaaaaacgcaagcctgcatggaccgatcgcatcctgtggaggctgaagcggcagccctgtgctggccccgacactcccataccgccggcgtcacacttctccttgtctctgaggggctacagcagccacatgacgtacggcatcagcgaccacaagcctgtctccggcacgttcgacttggagctgaagccattggtgtctgctccgctgatcgtcctgatgcccgaggacctgtggaccgtggaaaatgacatgatggtcagctactcttcaacctcggacttccccagcagcccgtgggactggattggactgtacaaggtggggctgcgggacgttaatgactacgtgtcctatgcctgggtcggggacagcaaggtctcctgcagcgacaacctgaaccaggtttacatcgacatcagcaatatccctaccactgaagatgagtttctcctctgttactacagcaacagtctgcgttctgtggtggggataagcagacccttccagatcccgcctggctccttgagggaggacccactgggtgaagcacagccacagatctgagccaggatgggagtgaatcccaggcggaggccagagctggcagccagctctgcctttccactgccgggagtgctgggggcccagcctggccccctgaagagacagccaagtgtcgtccacatactcctcccagagtgagctctaaccaggctcatttgctctctccactactcatctctggaattagccgcttaaatacaggtttttgttgctg

SEQ ID NO: 314 - DNA, 2377 bp, Homo sapiens
ggcggggacccagagcataaatttggagaataggaggattgttcttagataaaggactcttcttcctctgaagttggaggtttgtgggcatttgtagagagtgagacagaacaggaagtagaaatcattcatggctgatagctttggttttttcaattaccaaccaggagcattggtggagtgagggtaagacagctgggactgagtagaggttttaggtgagtagtgtagggtgggagctaagggcatgagagatggaaatgaccacaacaaggaaaaggatgcttactcatttctcaagagcagactccatgcctcacttgttcttaccctctacttgcaaagtacaatgctgtgcacatggtgggcctcagtaaatgtttgtagattattaaaacttacattgcaattcaccttgctctgtggtggggaggcctatcattcctgaaactactcaaacagacaccagagggcagcgttgcctgccatgttgcctctgcagcaggctctcctaggattgattgtcttctcagttctcaagcccactttggttggggagttttgtcatgactcacacccatgtgtgaatgtgagctcatatcccctgtcctactccaggcacaatccctcgggggccaatgtgtgcctgtggtgtgcgattcaagccaggagagtgaagtgcgaagcctgtttgagcaagtggatcgggaacagcaagggcgtctagatgtgctggtcaacaatgcttatgcaggggtccagacgatcctgaacaccaggaataaggcattctgggaaacccctgcctccatgtgggatgatatcaacaacgtcggactcaggtgggtgctccactgccaggacccatgttccctcactcacttagccaactcgacggccaggcctttccttacatgccctctccttttccctccggcctcccccatctctttcttctcccttccattccatttgtcccacttacctctggagaagttccatccaggtgagtctgtacctgagaatgtcaactctgtcagtaattttcattggaacaagcccttggcctctctcctgtctcactctctgcccatccaaatgcaagacccagaagggaggaagcctcctcctctcagtaatgcgcacagcctgtagtctatactttcaaaatggttagagggagaaattgttttattttagactgggagaagcttaagaagaaggagcgaacaccaatgctgtttagtctccacatcctcactccacacccacaggcaagggcactgccgggtcagagttgggagagcaggtacatcactgggtcacacagggtcatttagcccaggagtgagatgaaacacagcatttagaattcgcctagcataatgcacaccagttatgcctctgttactgttggaatgatgttacactctcatataatcaagtcatgcctgatggatgtgatcagtcacctgtgggagtaaccacgagattatcggcaaatctgtgactaaagcatgtaagaacacccaccgctccaattttggtactctggtaacaatcccaaggaagcaggattagaatgcaattgtgatttccaaagtggaaggaagatcattaggacagaggaggatggtgaggccaaaggcaagaaagggacacgttaagagctggaaattggccagtgttcatgaccatagcctccaaagagaggtgccttccacaccctcatctcttgctggccagggttttgaccctgaagcagagattcaaggcagaggcccagaccctcgaccttgggccctgatgaattatccaaggtaaaggccccttgatgagcccctgacagccccccagcacctcctgcccacccattccccatgcgcatttactgcctttcctctgtattaccttgggctgcactttcctttaaaactataactctacttgttttcatttggaaggtcctaattctttccctatgcaaaagaaatttattctggttaccaagttatgtgtgtgttactttttttaaatatggaaaaaatctgaagaccagtataatcttattcccctcagtgccatcccttgctctcttgcctgatatatagctactattaatagcctggcatatattctttcagatttttcatgtaaatatctctcattctttttaatacttgtacgtattctattgggaggatgtatgatcatttatttctctaatcccttatttgttgcagcagtggaattcttagatcaaagaatatgtacttcccttaggttatagagactgtgggaaaaatagaaaaaaagaaaagaaaacaaagaatatgtactttttaaagatttaataaatattatcaagctgtcctac

SEQ ID NO: 315 - DNA, 1856 bp, Homo sapiens
tttttgtatttttagtggagacggggtttcaccatgttggccaacaaggtcttgatttcctgacctcgtgatccgcctgcctcagcctaccaaagtgctgggattacaggcatgagccaccgcgcccggccttagttgtgtgtgatttctatgtgtgctctaggcacttgccctatagctgctcctaaatgtggggtcttagaaaacatcttgtcccttcgaagcatactctgctggttggctaaattgcactgggaaaaaatagcagcagccctattgctatgtcacttgcctgcagagcaaaagttgattcaggaacagtaatttgactttgtctatattaaaaatcataaatagtcaacaaatgcaaaaaatgcaaagaatttgtaggtatgattagtgcattataggtgttttcaaatttctcctatgataaattaaaaatgtaatgttgggcattaatttcctaaacccagtgctcagcaattttctcaaattgtttacagtttttccaagagacttcagaaccattccctggagtgaattatttccaatggtgaagagtaatggatggatggcatgagattctcaaaaaaatcttgctcctatttcagaagtgtcactccagccccttgaaggtccaggaaacctggctgagtagtgtggtctatggaggtgcatgggcttcagaatcaggccaacgttgatcctgagtcccagccagctgcttagtagctgtgggatagttacacaagacacatctacaagaaaagtcatgataaaattgattgcaaaaacagcaatttgaaaaatttcttattgtattcatgtccttggaaatggcttttatagtcgttcctatcaagagacagattctgtttcccaaaccttgaacttctcttgacttatctgcactggcacagggtgccagtttggggcccaggtttaaaggtcctaaatgcttctgttatctttttcagaattcttccatctctatgacaacaagcccattttagctttctggagaatagcatctgagaaaagccaaagtgcctcagtttacagacagctcactcacagaagcagagccacctaattcaccagcatctaaccactcacacctgaaggagccaaactgagcccagaagaatggcccggctgagcccagcctaaatttctaaccagctcaatcctgagctagtatgtttcgggattgttatgcagttataagttagtaatatatacacccattaaagacaggatctcaggacagattgatcacaaataacctgcaaatgcttgccaccctgtaagtattgattttcttttttcctttatttaaagttagatttgttgtaagatgatattgagttacacagaagttaggcaggagaatagggtttggaggcagggaacttaaggccaattcgtgctgacttcctacaagaaaaaacaccaaggtctgggagcagggaacctaaagccagttaacgtgaacttcctacatctaaaccaaaaggaaagacctcatctacacccgagtagcaaaggatcgaaggcgactgtcgctacaaccctcccccttgtaccagttctctgatagaaaaggacagtgccttggagtggccgtgggccaagcacaggccatgccttcatctgcatagggtaccaattcgcctcaacctttgattagccaaggaccaaatccttcattcagataaggggtagctgataggaacctcaaaaggagtacttaaaacccagaaaacattgtaaccgggtccttgggcggcttgctggggctcacacccaccctgtagagtgctttctcactttaataaaatcttgcttttgct

SEQ ID NO: 316 - DNA, 2311 bp, Homo sapiens
gcccgcctcggcctcccaaagtgctgggattacaggcatgagtcaccatgcccggccctctgctaaattttttaataaaaatttttaattgtggtaaaatgtacttaacataaaatttgccattttaactgtttttgagtacacgggtcattggtagtaagtacattcgtgttgtgtgttaccactattgtcatccaaacacagaacattttctgtcttgcaaaactgaaactgtactcattaaagagcagttccttattcccccgtcttcctggcccaccattctactttcggtctctgagtatctcatatgaatgtaattatacagtatttgtccttttgtaacgggctcatttcactgacaatgtcttcagggttcatgcatgttaaaccatgtgtcacaattttcttcctttttattgcaaaataacattccattgtgtttatacaccacgttcttttcatccatttgcccattaatggacagttgtgtcacttccagcttttggctatagggaataatactggtatgaacatggctgtataaatatctgcccaagcctctgtgttcaactatttgggtatatacccaggagtagaattgctggatcagatggtaattgcatttttaattttttgagacactttcatactgttttccaagtggctgcaccatttttcatttccaccagcattgtgtaagggttccagtttctttacatcctcaccaacatttactttcatttttttggtatttactttctcagtaggtgtgaaatggcatgtcattgtggttttgttttatatttttctaatgcttaatgtgatgttgagcatcttttcatgtgcttcttggccatttgtatgtcttttgagaaatatctattcataaagttctttgcctgtttttgaattggatcatttgttttttttggtgttaagttttaggatttctctatgtattcttgatattaatccccttttagatacatgatttggtaacattttctttcattttacaggttgcctttttactgtgttagcagtggcccgtgctgcacaaaagttttaaattttgatgaagcccaacttgtctgtttccgcttgttgcttatgcctttgttgttgtattaaaaaaaaattgccaaatccatgtcatgaagcttttccccttatgttttcttctaaaagttgtatagttttagatcacaaattttggtgaattaattgattttaagtttggaatatcatgtaagggtccagcttttttttacgtgtagatgtccactttttccagcaccatttgttggaaagactgcctttgccccagtgaatggtcttgacactgttacagaaaatattttgactgtatatgcaagggtttgtttctgggctttctattccattccattggtctgtatgttcttatgctgataccagctcactgttttgattactgttgctttgtagtacattgtgaaatcaggaaatgtttttccgtcaactttcttctttctcaggatagttttggttattcagggtcccttgagattctgtatgaatttcaggagagatttttctttttctccagaaaaagttcacttggattttgatagggattgaattgaatctgtagatggatctgggtggtagacatcttaatattaagggctgggtgctgtatcccagctctttgggaggctaaggcgagaggattgcttgaggccaggagctcaacaccaggctgaacaatgcagcgagcccccttctctgcaaaaaaaataaaataaaataagccgagtgtggtggctcacgcctatagtctcagctacttgagaggctaagtctgaaggattgcataagcccaggagttcatggctgcagtgagccatgattgtgtcattgcactcaagcctgggtgacagagtgagaccctgtctctaaaactacacacacacacacacacacacacacacacacgtgtaaatattaagtcttctagtctttgaacaggggtgtctttttacttatgttttctttaattttgctcagttatgttttgtagttttgtttatttcatcttctaggtaatttattcttttttgatgctcttgcaaatggaattatttgttaatttcattttcaaattattcattattgttatatagaaactagtcagcgtgagcctgtagtcctagctacttgggaagctgaggtgggaggatcccttgagcccagaaattcaaggctgcagtgagctatgattgcaccagggcactccagcctgggtgacaaaccaagaccttgcctc

SEQ ID NO: 317 - DNA, 418 bp, Homo sapiens
tggctcactccccactccgtctctggagcccaccagggaaggccctcatcccctgccgctacttctctggggaatgtgggttccatccaggattgggggcctctctgctcacccactctgcacccaggatcctagtcccctgccctctggcacagctgcttcctgcaagaaagcaagtctttggtctccctgagaagccatgtccctcgtgctgtctcttgcctgtcccacctgtgccctgccctccagcttgtatttaagtccctgggctgcccccttggggtgccccccgctcccaggttcccctctggtgtcatgtcaggcattttgcaaggaaaagccacttggggaaagatggaaaaggacaaaaaaaattaataaatttccattggccctcgggtgagctgagggtttttgc

SEQ ID NO: 318 - DNA, 2706 bp, Homo sapiens
ctaactttctgagtaaaaagcaaaggtgaaatttgggaaggggaaatagtataggttctatcattagtgttcatcctatcactggcagatccagaattttggagcagagactcagcagaaaaaaagaagaggaaaggttagaggcctgagattatttcaggactgattctttttggggggaattgccttaaccaatgtcaaatgctgcaggaaaattttgtatgaagtttgacataaaacgctataaataaaatattttaacttgagttccctgtttagaaagtagaactttaagaatatattaaaaatcaatatattcctaccaagggttttgatagcaactgactaaaaacacgaataaaagctcagcattatcacatatttattgagtctcaacactagacaatacccatttgaagcacaaagacatgttatctcgatagctgttattatttacatgcagtcaaggttttcaggtgtctaatgataaactcctaaaagcaaccaacacacatcaggaaggttactttggcaaccatgactaatcaaccacatgtacattttaggatgacagccgactgtcagtgataacacttttagattgacataggaggaaaaattggcattctgaccattaatagagtgggaacacacttaaggtaggcagaaataaatgctgcagtagaatgtgttctaaaattctacttacaaaaaaaatcattatggctcaaataactccattagtttccagaggatgtttaatattctatcagggactgagctttcacaaggttgaagctttagttgcctaccattatctttatcatagtattgtatggtcacgcccaattgaatgtaggtacacagatatttcaaatgggggccttcagggcactagaaaactcttaatgaactgttccatgaatgccttttcaataaatagatatagaagatactattcaaaagttgaagcttaattcattgatctcatttattaggtagatgtggagaactgagaaaatgggaatactatgtggtcttgctcattccccttcaactatatcacattgacatatccaactcccttgatttttaaggctgagtttaagttggtggtcttctgagaaagttaattgaaatgtcactttttgtatagaccagaccaataccctacatactggctttcgttctgcaggataatttagtatgtaaataatatgctgagcagcaaactggaatcctttcctattatttcagtatggataggcagttggattacaaacaccacactataattagcatatttgctccaaaatagttcatttatttaggatgaatacatgcagacataacatgactccaaaaaggtgtactgtgtattttttgcattaaatcattggaccctaccagagatagtgatccatataatgtagcttcttttggcctgactttaaagattgagtgaaatactccatttccttctgcttaaagaacactataatacaatttatgacattattttgtaattttgtatcctggcttgtctcttcttttgactgaaaactctttgagaacagcaattctatatgtatacatttatatctccagtatctatctcaaagtaaatgtaaaaaagtttgctgaatgtaagaataaaataatataaaacacgtattaattagaattactcccacttagtggagtgaactgttccatggcttctgatagtcctgatgttctgatgttcctgttggcttctgacagtccctctgatgtgtctcaaggtgtgcctcacacagcctctcggtaagcagggctagcttataagtaaataaactgcaagtgaaggggcagtaactattccccctctcttcctttctctctttctctccccctccctttctcttttgttcatagactcacactcactgtgaattatacattttccaatgttgccttgaaaatcttaccttttgtaattttctctacccagactcctaatataagcctcagatctaagatattgaattttcgattcatcacagtggactggtgattccccgtgttccttgtcttgattgactaattcctgagaactggctgattgagccccacccaggctgtctaatcctagccagatctgcttaaattctcttattaacatgataaacaaggatttttcttaaattttgtgcattgtctttatgccaaggaatatctagaaattgggccaactacatatgttgtcttcaagaaaagcttaccaatcgctttagggaatcaaaatgtataggtacacttctccattgtgaccttgtttcccatgttttttcagagagaaatatttactttgcaggtatcatttaattttgtattaaaagtcccattgttctcaaggcaaatattctacccctcctttggatgagcaaactatggctttgaagttttgtttgaaccagcaaaacatagagcctggataaaaattcacatttactttatccttgagactcctcaaagactctccaaataacaacttatctcagaaaaagaacttaacaattttatgaattccacttgggtcacaagaagatgctatgttattcatgctgttctcaaataaaaggatgttatggtgatttgagaggatttatgtgtagtagcaacaatatagtagattcctgataagaataaaaggcttttgtctat

SEQ ID NO: 319 - DNA, 2044 bp, Homo sapiens
caagtttcaacaatcagcttagctttagagaaaaggcatgagtacagagcagtcagagaagcagccaggctctccttcctggaggggagcaccgggtaacctcgcttccctttgctgcagatctctccttcccccaagccacacgcctccctgcctccactgccgttgtacgaccagcctcccagcagcccctaccccagcccagataagaggagctccctgtactttccccggtctccttcagcaaacgaaaaaagccttcatgctgagtcaccaggattctcacaggcatcaaggcatactcctgcgacctcatatggcaaactgcgacctgtccgggcagctccccctccacctacacagaatcaccgaaggccagcagagaagattgaagatgtggaaatcacactggtgtgatgatgggcttgcccatccattactgctacaatcaaggccaggcttggagtttggccagtcttgttttttaggcacctttgcatgatgatgactcttgaacagagcaaaaaacaaggaggattatgtgtgactgggtggcctggtagactcctcccacgttttgaatatttcgtgccttttttttttgttgtcattttctatgtcatttctcctaccatagcacaaatcctagcggaccctaggagcaaagaggggggcagccctcatgcctaacagtggtctgtttttatatgagactcaagaacaggcctcattccagggcacagtccctaaattactgatcatgtgcactcgtacagtatattactgtgaccacaaggatgtggcaaagattctcatctttcttcaagtggcttttgctcatctgattgagaattaatcagatcatgttggctacataaggaaacagaaggagggatttcaggagaggctggctcctccccaaggttagtccccagactgagaaagtgaaaccttattgggaaaaattggactgccctgaatttagcaccaattgcattaacgcacatctcttccacaactaacagacttaaaataacagtgtccttcgtattaatatctgtgccattcatttagaattagcagagctaatatggaggggctgaactagtagccacatcttgttcatcacatagactaatagaaaggaggctgtggctaaagcagaaatggaacttccggatctgaaattagccaatataatgttcttttgtatttgggtatttttcatcttaatttttacagcatatactcttcttaccagtatccttagaatccaaatgtctagataagttgaggacacatacctgcattgttgagcttctctactggggacgccccggcattattttattcccaagccagcagaccggcccagacagccaggctgtggctggtccagaccaactgctatggtggaaaatgcagcttccaggtcccactaccctgacatttccgtggaaggaagaacctggtggctcgtggaggaaaccagctttctatgagaaaggactgaaggattgcgcaccctgcacaagtacagattgaccaggaaaagacaagtgtcttctgtgtgtcacagggaaagccaggagtggccttctctgcaggccagcaagcctgcagcagcaggtgcccccacgtcaggtgctgactgtccgctgtccgctcctgtagaaggtagggagcacaatacctagggactaagggatgttcgccggttgtggtttgttttttttttttttccttggttaagaaatcaaatttgcagaatttaatctacaagttgtattatgctttgaaaactccatccctcctaagaatcttaaaaaacttgaaatgctcgccaaatgtccccatgggatttttgaccaaaagtaaggtgatgcactgaagaaatttttagttctttgatcacttcagtgacaatacccattaatgaatcttctccatgatttggggttttttttcgttgttgttttttacacttcttaacctgttgatctatttgaggtcttttgtgtttatcaaacttattcttaagttt

SEQ ID NO: 320 - DNA, 2266 bp, Homo sapiens
tgttgatctattcaaatgacacatgacttttattggaatttcttcctgttggtaaaactagaccactgctactgcaacagaagctcatcctttttgctgagttttcaggggaaatcaaacagctgtgtatcctgtgcttggccttcaaagtattcataatctgaactacttttacctattttccagttcttccaaatacccattttctgtttttattttccagatgactatgatcctgtttcttgaaatgtttctttttttaactaaaaaagtttttaaatgcatctcaggtctgggtgcaccatggttacaattaggccaagaaaaatattctctccactaggttttttaaatgttcacctccacttcttgacttaacacttgcccaaaacaaaacggatctcttttgcagatgaatatggtacccctgacaacacagtgggttggttcagtagcatccattcaacatatatttattcagcattacgaaatatcaggtgctatgatggatgttatatataaagtgataaacaaggtaaatattgggctcatattctattgatggagacagacataaaaaattgtcacatgaataaacatacaatgaatatataaatacaatgatggaaaagaaaaattgttatacgcaagagtcagttgcttctttaattgcatggttaaggatgcccgctctgtggaagagatagtttaactgagacttgaagatgagaaggagccagtcaggcaaagaactggtatggatatggggtagagagtggtccaggtgaaatgtgataatcctaaggccagaaatcattttggggatttggggatctgaaagaatgttaaaatggtcaacatactgtgagttagggattgaggctagagaggcaggtagggtccagagcattcaggcagaaacaacaggaagtgtgggtgctgagtaatcaaaaggatggactgagctggttactaagttactgcttctcagcttcaaagctgtccttccacacccatttcttctggatgctgagatggagactctatatcacaaaatttctgcattatcagctgccaacctgctaagctctgctgaaggaagacactaagggacactgaaaggctagaggcatcataggaagagacctgctctttcctttttgcttccagttcctgttggcaaggttctagcaaagatgatactaatacaccttggcagtgacagtagatttcagtttgcacgtttcctaatattgttaggttcagcttcactcccattccaaacccatcctgagacaggagcaacggctggctggagagtcctccttagaggtctaagtcctgctttatggaatatttcctccaggtgtctcataatcccaagctcttaataactccaaccttatctctgtgttcccccagacctaaggcagatagtttttcaccgcatttaatagttttgtgatatcttaatgttttctttttgtctttttgcattctctaacatctggttgaaattatttatattaaattcattttgttaaaataactagtgagatttctgtcttttgactagatcccaattgatacagatgatgttaggaaatggagacaagtgattttcaagtttctagctaagttgggtggatgaaatgccattttcatgggaagacttgaataagaatattttgctatcttagataagcaaaagtttagttttggacatgtaaggtatgaaatgccttaaatgagacatttaaatggagatgcagcagaagcagtcagatagacaaatttagagctcagggatatggctgcaacaagtaggtgaaactacacaggagatggaaagattggaaaaaacccagaaaagttttgtggtctggaagccacgagaagaatgtttcaagaagaggatgtgtggtgctgcataaaaatagacatataaatcaatagaagagaattgagaacacagaaataacccctcacatttatggtcaattgatttttagcaaaggttgccgaaacaatcaacagaatagaattttttttaacaaatggtgcatgaacaactggatatctacatgcaaaagaaaacagctggacccttcctcacataatatgcaattattaactcaaaatggaccaaacacctaaatgtgagagttaaaactgtaaaaatcttagaagaaaacataggggtaaatctttgagactctggattaggcaatgttttattaaatacaatgccaaatgcacaaacaac

SEQ ID NO: 321 - DNA, 1640 bp, Homo sapiens
agcactggaagtcgccggtgtttccattcggtgatcagcactgaacacagaggactcaccatggagtttgggctgacctgggttttcctcgttgctcttttaagaggtgtccagtgtcaggtgcaactcgtggagtctgggggaggcgtagtccggcctgggacgtccctgagactctcctgtgcagcctctggattcaacctcaacacttttggtgtccactgggtccgccaggctccaggcaagggactagagtgggtggcaagtctttcatataatggcaggagtacatactatgcagactccgtgcagggccgattcaccatctccagagacaattccaggaacaccttatatcttgcaaatgaacagcctgagaactgaggacaccgctgtgtatcattgtgcgaaagagagaggtttaatccacatggttcggggacttgttacgacaaacatctactattccggtccggacgtctggggccaagggaccacggtcatcgtttcctccgcctccaccaagggcccatcggtcttccccctggcaccctcctccaagagcacctctgggggcacagcggccctgggctgcctggtcaaggactacttccccgaaccggtgacggtgtcgtggaactcaggcgccctgaccagcggcgtgcacaccttcccggctgtcctacagtcctcaggactctactccctcagcagcgtggtgaccgtgccctccagcagcttgggcacccagacctacatctgcaacgtgaatcacaagcccagcaacaccaaggtggacaagaaagttgagcccaaatcttgtgacaaaactcacacatgcccaccgtgcccagcacctgaactcctggggggaccgtcagtcttcctcttccccccaaaacccaaggacaccctcatgatctcccggacccctgaggtcacatgcgtggtggtggacgtgagccacgaagaccctgaggtcaagttcaactggtacgtggacggcgtggaggtgcataatgccaagacaaagccgcgggaggagcagtacaacagcacgtaccgtgtggtcagcgtcctcaccgtcctgcaccaggactggctgaatggcaaggagtacaagtgcaaggtctccaacaaagccctcccagcccccatcgagaaaaccatctccaaagccaaagggcagccccgagaaccacaggtgtacaccctgcccccatcccgggatgagctgaccaagaaccaggtcagcctgacctgcctggtcaaaggcttctatcccagcgacatcgccgtggagtgggagagcaatgggcagccggagaacaactacaagaccacgcctcccgtgctggactccgacggctccttcttcctctacagcaagctcaccgtggacaagagcaggtggcagcaggggaacgtcttctcatgctccgtgatgcatgaggctctgcacaaccactacacgcagaagagcctctccctgtctccgggtaaatgagtgcgacggccggcaagccccggctccccgggctctcgcggtcgcacgaggatgcttggcacgtaccccgtgtacatacttcccgggcgcccagcatggaaataaagcacccagcgctgccctgggcccctgc

SEQ ID NO: 322 - DNA, 2670 bp, Homo sapiens
cttcgtgcttcttcttaatggatgtgagaggactctggctggaggaaggggaaggatgcagtactttccatgggccccttattcctgtcagccctccttgggtcacctgggacagaaaggggtcaggatctgaggatgcctgtgcagaagcaccggactggcctgactcgggggggcagaagcccactgctccattttgcgaccctgggagcagcattccctttgtagtcaatgtggttggcgccccctagagccaaaggcggaagaaagcatggctccacagagaagagactgagcttggtgaggccccagccctctgagtcacagcttgcccaaggcctcagggcttccgcttgtgctttgggaaggagagccagggctgagtgcaggctgggagccagccctcctgggtgctctgggaggaggctgatgaggaggttccccctcctcccagggcatcttgagcaaggcctgtgtctcacctgggtgggaggagctgagccagggaaggggcctgaacagccccatccaccccgtgggagcccatgacttctttaaggtcagagctggaggagtgggttcccaggcaagggaagggctaaggatgcaagtctcagcctgctggaccagaggggctggctggggcccttttaaggggtgggagtgccacatctttcatttcctgaccccaaactctttctgcttgaatgggagcagcccgaaccagcaaagaaagagacctgggccttccttgttgttagtgagtcagaggtgggggtggagacataggaagctactcactctagagtacccccaaacccctaatctcttccagagcattggagtggggtgggggaggggcagagcaaagcagacatgcagacatattctagtttaggaagcacttcctcccactttgcaaaacagcttccagaaatgagtgtattttccccatttcacagatgacaaaactgagatttagagagaagtcacctgctgaggtcactcagccactgagtgctgatccgggattcaaaccccatagggatggggaggacaggtaaacagggcagaaagactagggagccacaggtctgaggcacagggagagcagggaccccgggcacagaaccccattgagtccctccatgctcaaccctgctttccagagtgtgctcccactcttaggccactgttgaaactgttcctgcatctaggcttcaagggtggggagctggctgtggactggaatcaggagcagagagctgagatgaattgccctattaagagtgtccccagactcctcctcctgcgccaacgcagctacttccatctttaaatgggtgacctgggggagagcccatgaatacaaactccgccagccttgggcaccttcagctggatgtccagctgggccttgagaagaatcaacctttgacccataccctggggactctgggttcacagcctggtgtccctgacctgccctcagcagcctttgagggtttaggacagctaagggtcatgttgagacagcagagcgataggatggaggcttagacctagaggctaagagtgcagagtcctagggactaggctgatggggacaaaactctcttgcacacccagaatctgagctccaggcttggcttggccactgaacagtaaggtcacctagatggctctcttctcccacccccacagagtctctctcagtgtcttcatctgtcaacctggaggtttcagttgaagggggcccccacctcccggtggggcccttgtaagaatcaaagaagattgtatgtttccggctttgaaaactgtactaggctgggcgtggtcgctcgcacctgtaatcccagcactctgggaggccaaggcgggcagatcacgaggtcaagagttcaagaccagcctgaccaacatagtgaaaccccgtctctactaaaaatacaaaaattagctgggcgtagtggcacacgcctgtaatcccagctacttgggaggctcatgtgtgcatctccttgtgtgcccctgtctgggccaggctgtgggtctgggtcacgtgtttataaaaaccagagataggagatgcgcatctgttgcgaggtctagagataaactgctgggcctgccccatgccagcctcagggggaagggagttagtgatatggagttgacacagaccagtcatcactgtgacaggcctagggggtctggagggctctggttcacacctcaggatgcctggagcccctaggttttctgatttcctatctccatcctcactggcaggaaagcttctggaactaggagagggttgcttaagaggatgaggggtcaggaccagagatggaggaggaaaagaaagctcacaggtggctgggcgcagtggctcacgcctataatcccagcgctttgggaggctgaggcgggcggatcatgaggtcaagagattgagatgatcctggccaacatggtgaaaccccttctctactaaaaacaaacaaacaaaaatggctgggcgtggtggtgcacacctgtagtcccagctactcaggaggctgaggctgaggcaggaaaatcgcttcaacctgggaggcagaggttgcagtgagccgagattgcaccactgcactccacccagacaacagagcaagactccgtctc

SEQ ID NO: 323 - DNA, 1914 bp, Homo sapiens
gtccagagagaaaaaagaatcagaagaggctgaacctagtattgaggcctatgaaaataagatgcagacatcatacttgagaaactgttaatggaatagaaaagcttgaaaacatagtgaatacattcaattttttggtctcagcacaaaatcactggagagaaaaatgtacgtaacaagtgtgatgtgtttggtgctacagggaagggatatagaatagtgatactcttaagcatcatagaagcgatgggaacatcaggccaattactgagaaatttcctattgactgaaatcatgtgtgacagtttcagaaataatgataggctctcgtatatgttggtacgagtttactgtaaaaatcaatagcccgacttggtgctcaggctctgttttctccttcggtgatatcgaaactgactttcagccctttcattgcacttgtgactccgggggacacgtgctgatttcctggttctatcctaacggtgcctgcccttttctgtttactccatgtcagtgcaggcattgataagaattctagtcggtggggtggtgaagacatcaagagaccttaacctggggtttccttgctgtatcttaaacttttgaccaccattcttacatttgctgtgatcagtttgtagtctttatgtgtaatactttttctccccaccttcctggggggaaaattccacatgtaaaggatttgtcaaattggtgataagaccaaacagccttaggggacatgagaagtcttatgagcattgtagacctgctggtgagctagggggtgtaggctgtgtggggtactttctgttctttacttagagatttggtagggaaagttctctggaatttcagcagttgttctgatgtcatgtgtaaatattatctttctgtgttgcagcttggggccaagcttttcatggaaactgctgaaaattatttagtggcatagtagctgtttttgaagttgaagactttatacccaaatccagatggacgaatctttcactttcttgctacagattttgtgaagaagtgttactcaaactttaggtgacattaacaccataagtgtgttaggggaagagctgggataaagggatggagatgctttgagctgctacagtagtttgcacattcttacctgtctgactctatttgccatcacatatagaatgtggagaatgaccaagcaatcttaaactttaataattgggtttacataggaaggaaacaacaggcaaatctaattgtaaagcagagacatgcatttagtacatagataattggaccaatttcagagacagaaatgaaggaaaaatgagccccacaggcttgagggtcaagctaggctgtaagacagaaattcactctgcatttctaggaagatggcttgtggcttttacacaggaggactctgaagaacctgctatatcaagtgtcagttatgtgcaagaaacgggattagatactgtggatgaatagggaagtttactagtccttgaccacagggagttcacacattaatacacatgaaaacaaaactgccagggtaaagcccagtacatcctaaatgccaagtgaatgatatacacaatagccagttgctcagcggaagaaccagaaatttgcctggggaaggtctgtgtagacttgcttccatatctgcgctgactttgggggtcaggggatctcttaaggctttgaacaaacacggtccatctttcttggtgccagttttacttaagatttggaaggaagatttttatattaaaataaactctgccaggcacggtggctcacgcctgttgttatcgcagcactttgggaggctgaggtgagaggattgcttgagcccaggagtttgagaccagcctaggcaacatagggagaccccacctctgcgtt

SEQ ID NO: 324 - DNA, 2275 bp, Homo sapiens
  misc_feature 2149,2268,2273: n = a,c,t, or g
gcagctgccagatccgctgatctagtgcttctcgaaaaaaaccttcaggcggcccatggatgttactatactggcatttgtttttaaaaagctgtcgatattcaaccagcatgccttggactttattgtgggaagaccctattatttaaaaatggctcaactgaaatatatggagaatgtggggtatgcccaagaggacagagaacgaatgcacagaaatattgtcagccttgcacagaatctcctgaactttatgattggctctatcttggatttatggcaatgcttcctctggttttacattggttcttcattgaatggtactcggggaaaaagagttccagcgcacttttccaacacatcactgcattatttgaatgcagcatggcagctattatcaccttacttgtgagtgatccagttggtgttctttatattcgttcatgtcgagtattgatgctttctgactggtacacgatgctttacaacccaagtccagattacgttaccacagtacactgtactcatgaagccgtctacccactatataccattgtatttatctattacgcattctgcttggtattaatgatgctgctccgacctcttctggtgaagaagattgcatgtgggttagggaaatctgatcgatttaaaagtatttatgctgcactttacttcttcccaattttaaccgtgcttcaggcagttggtggaggccttttatattacgccttcccatacattatattagtgttatctttggttactctggctgtgtacatgtctgcttctgaaatagagaactgctatgatcttctggtcagaaagaaaagacttattgttctcttcagccactggttacttcatgcctatggaataatctccatttccagagtggataaacttgagcaagatttgccccttttggctttggtacctacaccagcccttttttacttgttcactgcaaaatttaccgaaccttcaaggatactctcagaaggagccaatggacactgagtgtagacatgtgaaatgccaaaaacctgagaagtgctcctaataaaaaagtaaatcaatcttaacagtgtatgagaactattctatcatatatgggaacaagattgtcagtatatcttaatgtttgggtttgtctttgttttgtttatggttagacttacagacttggaaaatgcaaaactctgtaatactctgttacacagggtaatattatctgctacactggaaggccgctaggaagcccttgcttctctcaacagttcagctgttctttagggcaaaatcatgtttctgtgtacctagcaatgtgttcccattttattaagaaaagctttaacacgtgtaatctgcagtccttaacagtggcgtaattgtacgtacctgttgtgtttcagtttgtttttcacctataatgaattgtaaaaacaaacatacttgtggggtctgatagcaaacatagaaatgatgtatattgttttttgttatctatttattttcatcaatacagattttgatgtattgcaaaaatagataataatttatataacaggttttctgtttatagattggttcaagatttgtttggattattgttcctgtaaagaaaacaataataaaaagcttacctacataaaatttcaatgttttgacacttaattgttgtttggcacaatagtatggaagtaattcaaactggtaaatagtttcctctcatatctcgggtatatatacataccatattttattgatccagagatacttatttcactttgtgacatctctgaattaggatgcatcttacaactgatggcttattaggtttaatgaaatacagaagatacacagtataaaaagggttttcctgtggttggtttgtggtttgtgataggtgttctgtgatgtttatgctttgaaggccttaagactcatggttgcaaccatggaagcaaaatgaaatttttagctcttaacctaacaacctgaccatgtttatccatttttattgtttagaagtttatttactgatacttggtggaggttgtgtgaattagttaaattttaaatgtttaagacttctattaacagctgcaaaatatgaaagtaagtgcactcacttttcctgtantagtctgtcttttgaattcacagcagttgtatccttgagttactttgttaatgtatttttctcagtacatttaaccactgggaaatgaacccttgtacgaatgtgtttcttcttctctnttggnat

SEQ ID NO: 325 - DNA, 2029 bp, Homo sapiens
  misc_feature 1929,1993: n = a,c,t, or g
gtattttattggtccttgaaagattggtcgttatggatcacccagcctttccaagtcagtggctgttgttctgtcttgctgtctgatacgagagtggggcttttcagtgaactaaccagggattgttcttgacatacctgacttttctcacatttgaacttccactatcattgtatccatataacttctagcattttcatgccatggtaatccatgagctacacatacgtagcccggcaccgtgatgcaagttcatggtatcgtgcatgttcgtggtatcatggtatcattcatgcgtgtttgaatagttctacatctagtgcttcttgccaaaaagaatacattgtttaaattcacaaaattagcataattgcagtgctaatgaatatcggaatatgtgcacagtaacatttggactattcattggagagtttacccatacatttagcaaattgaatggccaaaacatttgactccagtgagggctcaagttagatccctatagaaagaggacacttcatcttacttaagtcatagttaagatctgtgatacgaaccatagatattgcctgacaaagcagaaatcaccaagtttcccccttttgaattaccaccaagaagtgttgaaacaccaaatagatatcatgttattttgggcatttgcagttttcttccctgctgcatgtaatgtctcagaatcaacattcttttaaaatctagactatattttgaggcaatgaattacttatattcaacttaggcttgttttgacattcagtagaactttaagttcaatctaaaggcttcagtccacatttttttatacgttgtattttaaaaacgtttgaaaggagtcttacacctgtatcatgaaaactgaatccttttgaaataccactatatgaagagagagatgaaatttagtgaacagaattgaaaaggtgctcataatttcactatgcaaacttaccccagtctctaaaaaagtaatttagatttaaagttctttgatgtatttgattttctaaatctttatggttatgatttggaataaaatgtgcctaatcctgtgttacattctgttcttaaatctgaatgccttctcatttaattctgaggaaatatcacacaagtgtcttcattgaccttgaagaaatgtatatacagttgccttataaaacaacataaatttagaccataacttttatagagaaagggttttgtcaaatgttttctgaaaatctgagtaattcaaagcatgcctctgcccctttaatatttttaataacctgcattgttgctgtctgccaaatattaaattgaaatcttcatttcaattttattatctggaaagggcactggattgctctgcaaccaaagaaagcaatatggaatgaaaaaactcattcacttttgtcttattttcttttaaggtgtattggcatgtaatttgcatagagaaggtcctctggttagtctctcaaattgaggctgtttagggaaatccttattcagttggtggcagtggttggtttaaagtagaaggaaataagatcgccttaataccagaaatgattagaagtgctgatttagattcaacaaataccatatgtccttatcattttttgtaagaagaaattggttaagtcctaactttcaatgtgtacccaaatacttgtatttatgcttttgataaaatgtattttcagcattaatacacatccgattatgccttatttatatatgaagaataaagttaccatgttatactgttatgtcctaaaattcaaatcactatttgagaaaccctcaaattggtgctttcattatataatgatacatttagacaaaaccccaaactaagccatttgaaacaagattctctccattgcagtttgtagcaatgttatttctgtgtatgtcatgggnaggctaaatatcagtgttaatttcttgtttgaatccgtgaaatcatgcctgtaaagcccaaacntttgtaacaaactccctaataaatttagagaaagtc

SEQ ID NO: 326 - DNA, 403 bp, Homo sapiens
catcgacagggttccaggacctggaacactttaacagaaggaaatgccgaagcagcttgcacagttgctttacagacttccaagaggctgattctggcttcaagatggagccttggagttggttttttttttttttttttttcttccctcaaagaacctgcggttgcgctttgtgtgttttgtttttgttttccatttgggggccccatgggaaagagcttctgaactctttcctttatgaactcccactgtgttcctataaaggccctttctttcttagtgttgtaagttacattttcattatgccccatcacatcttctttactgtaaaaatattaaaaagctgtttccaagtgggacagctaatgaagctctaattattgcagacatatttttgagatgt

SEQ ID NO: 327 - DNA, 1863 bp, Homo sapiens
gtgcatggcatgtgtgtggcacagatggctgggacgggtgacagtgtgagtgcatgtgtgcatgcatgtgtgtatgtgtgtgtgtgtgtggcatgcgctgacaaatgtgtccttgatccacactgctcctggcagagtgagtaacccaaaggccccttcggcctccttgtagctgttttctttccttttgttgttggttttaaaatacattcacacacaaatacaaattgacaggtcaaaatccatgaaatgagatcccccagccgtgtcctccagcccagccctgaccccttggtttctaccctggctccccttggtttctaccttggctcaaccgacccctgtctgcccttctccctcctgcttctgaggtcaagctctggcctgcgagcctgtccccattgcaaaggggagggaggggcagggagctgtctaccagctgaggtcctcccaaaactgggccgatgtggtgtgacatccccaccagcctcagatgagacgggccaggacgcccagccacagcaagccctgtccctttgccggatccccaaacactagagaagctctcctaacccaaggcggagaatgaaggtggtggcggcagaggaggagggcagcagctgagaggccagggacagggtgcctcgccaagctgtctgaggtctgtcccaggtggcccaggtggtgcaggtagaacagggtgaggagagggggtcggctcaacaggaggaggctgtggctgcagagcctggaggagcttttaggtgttgagatggggcagctctgaatcctagaccctggaatagcctgtcccttttctctgggtctcgtggtggagccatgatctgggctgctctcttggggacactgggtggtggttacacagttgacctctgcctggctcccccttggtgcaactcctgcctccatcccccttgctggggtcccctcatccacttgagggcgcctgagggccaggagcagcaggcaaggagcctgggtctaggctaagggggtgtgtgcccacctcctccctgacccttaacactcctgtcctgcccagaccaacagagagagctgtccctgagaccccggagagaagcagctgccgaaagctgcagcctttccgcactctgagaccatgatcttcctcctgccaggggagagccacccacaggccatgtccagccccacttccctcagcccccagggcttccttctggcccctctgaggattccctagggctgccccgcagaggggcttccccaagctctgttttgaagcctgcaatgtggaaaagtgagaagtcagagggaacaggacaggtgcagccgggctctgaggccacacctcacacctcgctgttccccaacatcccctgagcagtgtgagctcatctcaccagatgagaagaggccctgtgcatttcttttgtttgtttgttgctgttttcccccacccatccagttctcctcagcaaagcaaattccttaacacctttggtggagaatttcttacccagacttggggctgtgatgcccttcagtgcgtggtgagtgcagcgtgtgtgcgtgtgcctgtgtgtgaacctgggggccatcctggtggcctgggagcgtgaggagaggccccctgtgtgctgggtgagtggtgggtgtggggtcaatgcagtgaggctctctgggtgaggctcccaacctggcagtccccagcctcccagcatctgtgagcgtctgttggactttacagaagagcctcatcccgtctgcccctcactctgccctggaatcaacatcttccgagtccttcttgggggaaatagcagagccccacttaactccataaactgcttcccattccgc

SEQ ID NO: 328 - DNA, 1855 bp, Homo sapiens
  misc_feature 1855: n = a,c,t, or g
caccttggagggaggggtctgggctgggtatcaccttgcgggggtgtcatggggccaggaagctcagtgggagggaaatccctggtgggcactggagggctaggaaagttgtggggggcccttcagccccctaccacaaagttacactgaggctccccccaccgatgctgcatacagatggtgtcgggcaccaacgtgtacggcatcctgcgggccccgcgtgctgccagcaccgagtcgcttgtgctcaccgtgccctgtggctctgactctaccaacagccaggctgtggggctgctgctggcactggctgcccacttccgggggcagatttattgggccaaagatatcgtcttcctggtaacagaacatgaccttctgggcactgaggcttggcttgaagcctaccacgatgtcaatgtcactggcatgcagtcgtctcccctgcagggccgagctggggccattcaggcagccgtggccctggagctgagcagtgatgtggtcaccagcctcgatgtggccgtggaggggcttaacgggcagctgcccaaccttgacctgctcaatctcttccagaccttctgccagaaagggggcctgttgtgcacgcttcagggcaagctgcagcccgaggactggacatcattggatggaccgctgcagggcctgcagacactgctgctcatggttctgcggcaggcctccggccgcccccacggctcccatggcctcttcctgcgctaccgtgtggaggccctaaccctgcgtggcatcaatagcttccgccagtacaagtatgacctggtggcagtgggcaaggctttggagggcatgttccgcaagctcaaccacctcctggagcgcctgcaccagtccttcttcctctacttgctccccggcctctcccgcttcgtctccatcggcctctacatgcccgctgtcggcttcttgctcctggtccttggtctcaaggctctggaactgtggatgcagctgcatgaggctggaatgggccttgaggagcccgggggtgcccctggccccagtgtaccccttcccccatcacagggtgtggggctggcctcgctcgtggcacctctgctgatctcacaggccatgggactggccctctatgtcctgccagtgctgggccaacacgttgccacccagcacttccaagtggcagaggctgaggctgtggtgctgacactgctggcgatttatgcagctggcctggccctgccccacaatacccaccggtaagaggctgggctggttgttgggggcaggggtagaggtcccctggacatgcagacagcttgtgggttgcctctgagtcctttgtcttacagggtggtaagcacacaggccccagacaggggctggatggcactgaagctggagccctgatctacctagcactgcagttgggttgcatcgccctcaccaacttctcactgggcttcctgctggccaccaccatggtgcccactgctgcgcttgccaagcctcatgggccccggaccctctatgctgccctgctggtgctgaccagcccggcagccacgctccttggcagcctgttcctgtggcgggagctgcaggaggcgccactgtcactggccgagggctggcagctcttcctggcagcgctagcccagggtgtgctggagcaccacacctacggcgccctgctcttcccactgctgtccctgggcctctacccctgttggctgcttttctggaatgtgctcttctggaagtgagatctgcctgtccgggctgggacagagactccccaaggaccccattctgcctccttctggggaaataaatgagtgtctgtttcagn

SEQ ID NO: 329 - DNA, 2095 bp, Homo sapiens
gggtatagagcttagcttgccatgtcctgggtacatttccagtagtcatttagttagtaccagtgattcccactcaagtgtcccgtaaggaggtaccatgggaaataagagcagcctcttggcattctgggtagggagcctgagccaaactctaaagctgtctttataaagggaggtcatgtgatggccagaaattgcctttgcttcatggtgcacttggtggggagtcaggtgtggggtgctgggtttcacatcatcccattttcttttctgccttcagacctgcaatgcttcttttgccacccgagaccgtctgcgctcccacctggcctgtcatgaagacaaggtgccctgccaggtgtgtgggaagtacttgcgggcagcatacatggcagaccacctgaagaagcacagcgaggggcccagcaacttctgcagtatctgtaaccgaggtttctcctctgcctcctacttaaaggtccatgttaaaacccaccacggtgttccccttccccaggtctccaggcaccaggagcccatcctgaatgggggagcagcgttccactgcgccaggacctatggcaacaaagaaggccagaaatgctcacatcaggatccgattgagagctctgactcctatggtgacctctcagatgccagcgacctgaagacgccagagaagcagagtgccaatggctctttctcctgcgacatggcagtccccaaaaacaaaatggagtctgatggggagaagaagtacccatgccctgaatgtgggagcttcttccgctctaagtcctacttgaacaaacacatccagaaggtgcatgtccgggctctcgggggccccctgggggacctgggccctgcccttggctcacctttctctcctcagcagaacatgtctctcctcgagtcctttgggtttcagattgttcagtcggcatttgcgtcatctttagtagatcctgaggttgaccagcagcccatggggcctgaagggaaatgaggcagctgctgtgtccccacggaaacaaccatctggggactgctgggaaatgctgtgaatgcggagggaagtgatgtttgggttctgtacctgagagatttttattcatttttaactgccccccaaccccactccaactccttctccaccacccattctcccaatggtctttagaaatagattttcatctgatattctgcagaaatatcaatgagacttggtatgggacaggggcagaaaacactacataggcctccaaggcaaaaccagtcccagtttctttaatgggaagaagctggaattcctggtgctcaattcttagtgaccccaatcctatacccaaatctatgatattctgggacctcagtgattttggtcccctcccacttctctagttcgtcatcctcccttcccatatccttcaaaagaaccacactagggtctccacctacttatacaatgcggatgcccaactgtttttaaggaagccagaagcatcccatggaccatggggtgagtgtcctccaagagccccctgagctcagccctctgcctggagggctccagacctttctgagccctgcttggaggcgagcattttcactgctaggacaagctcagctgttgaggacacccccaccccaaatttcagttcttacgtgattttaaccattcaacatgctgttgggttttaattctctaattattattattattgttattattttttaggaccagttgtagtgaattgctactgaaagctatcccaggtgatacagagctctttgtaaaccgcagtcacacattagggttagtattaaactttgtttagatgtaccataattaacttggctagttgattgtttgaagtctatggaagaaatagttttatgcaaaattttaaaaaatgccagtctggtcagggaagtagggggtttcaatgctgttgggaaccaggaaggtgggacagccggcaggtagggacattgtgtacctcagttgtgtcacatgtgagcaagcccaggttgaccttgtgatgtgaattgatctgatcagactgtattaaaaatgttagtacattactct

SEQ ID NO: 330 - DNA, 2380 bp, Homo sapiens
ggaaaagaaaattaaaaaatttaagagagagaagaggagaaacttcaacgccttccagaaacttcagactcgacggaacttctggtctgtgactcacccagcaaaggctgccagcctcagctatcgccgctgactgtgcccctgtggaaggagcctcctggagacaaggcgtcccttcccgggagctgtcggtctggatctgagggagctctctgtgtgggctctgctgcgctgggagcctgtcacggtaggagctctcccggtaccagtgtccacagaccgcccaacacagaggctttgaggcttctctagatcggaacctctttggtgacattcccgaccagccctgcaagagaaacgacagtgtgtgtgtgagcagaggtggccgcacacctgctggacatctttgccaggctgtgccttctcatgtttcatagacagtggtctgtgctggcagaggctgctgcccctggttggggctatcaggagagtgggggatggtggccacatgtcccccaggtggtctcccggtgcatagctggtggctctgggcaagccatcccttgcttctcggggctgacgccaccgttgtgtccgagcccgccctcccctgcttcctcagcgggaccccttcatctgttggccttacctgtcctcagaaaggaagaggtgaccccacccagccacctctcccttttatggaactcgagagggtggccctactgtgcaccccttccttgtgagtagctctcaactgtcctggagagcagaggctatttggggtcggaggagccctcgatacctgcgaatacatctgctttccaggctgctgtttattctgagacgactgtgctgtagcttcccttgcagctgcaataacccgcaggtcttcactgaggtggaggctttggggtagaattctccatttattttactacttaatacaaaacatttatttttgaccagtcctgtggcttccattagcaatatgtttcctttcccaaatatgcaaatagtggctttgtttgctcaattttgtgagtgctttggaatttaaatgattgtataactcaagaagattacttttctatgttgctcaagctgtgcctgccaacttgtaacttaataaatacaggaaatcctcagagaaggtgatattttcaggaaaaagacaaatgccctcatagtagtgggaagtgtgaaggtgaccgtgaacatccttcctcatcgggtctgtccccgtcatttcctcccggagtcgtcgcaggtggagatggacaacgtggtgttggacttagacctccttcagtgtggctctgctgggccagaggcatcctgctgtcccgggtggctgcctcgctgtctgcaccccctctccctggggcagctttgcttcctgcccctgtgctcggggcctgggtggttactggcgtgtagatggaattgcttttttaatatgggaagatacatttatttttttccatgtgggtgggtgtctctttttggattttcttctgtttttacgtttctcttcttagaagggtgggagagaatcaagctcctgtggccacctgtgtcccagcagcagtgagtggagctgctcagggtgccctctcctgcggaccagtctctgaatgttcaaagatgagggcctggcttccgtgctctggctttgtaacttatctggaagggaaagcacatgccttcacgggcagggtatgttccttttcttctcggggtgttgacttgcattcctgtgtgaactgttccctctgccatgtttaccgtgtgatgttctgtagttgaaaatgttagttgtctgctggcacagaatttatctcgttcctttctctcccttctctcctccaaatcagtctcttcccttctccactagataactgtaaaaccttttcctggggtacatacattcgttaactcttgggcagtggtgagcacgagatgactttctgcagcgtttatcactgttgggtggagtcacgtcccttccctccaccgaagtcatcaaccagatagggaagggaaagatgaggcccagaaaacgagttcaaactctaggtcttgtacacgtatgtaagtaaatgtcaataacccaagcctttgtcatagcagtcacttggttgacttaggatctgggtctgttgaattttgtgcttgggaatggagctggagggagtggggcctgtgtacagcagctacctctcccaggtcctctcacttgcctgccccgcgtcctggttgcatggccgcacctgtgtgtgtgcagaggtctgtgtcccatcctctgcacctcctttccgggggcctggggagccccacgtgttgccaagatcttggtgcaataaaatactccggttttgtg

SEQ ID NO: 331 - DNA, 1266 bp, Homo sapiens
gttaattttaggaaaattacagagccttttaaccaccctatggccagacttcagtgttgttctttttatttctacctcatttcatgttgagtcttaacttcgctgtctctctttatcatcccctacccctagtctgaatgttgaagaatgctaaagtatattttattgcttcattgactaaaactatgtttctaaaactatgaatttgcttaatgagtcagcaactgtaactataattaacagtatagtttttacaaccatagttttgtggtaaatgtgcagttctcagaatttaaatgtaaacgttcaatgaaattaaacaaaacccaaatcttcatgcaataggtagtatatatgtattcagtaagggtcaccaaacattaattgaggttctattatggttaacttttctactttgtacttagggataaaaagatgagtaaaattgtttcctgcatttttccccacccattccctccccattttctttctttcctaccttccacagccccattgagtgtctacttaatgtgccaagcacacagtatataaagatataaagagctcaaggatgtaaagataaatgaggatctagtgcctgccctagttcagttatcccttaggaagacagaccagtcctatgtcagtcagctcagaaaagtgcaataactgttgaagccagggccacacccagtcttgtctgggttcactaccccactttccactcatactttagcgatgaacagaatttaagtcatctaaaaggaggagcaagattaaaacagtgaaggaggtatgatgagtaacagaaaggagctcattggtgactaatgaaagagcaactgctgtgttaaggggttgatgaccatattcgccagtgtggagttgaaggttaaggagtgaatgggaaatgagaaagtagacttcaaaaaagctggatgttgtggagaggaatagagaaaattagaggttgaacatgtagtaagagtgagtgaatattttttagaatggggagataagtgtgtttgtttgctgtctaggagtgagctatagaattgtccaggtgagatggaaagataacagagagaagatatgagaacaaaatcctgtaggaaattagataatatcaagaacataaatagaaggcctggcacaaagtctcatgcctatgatcccagcactttgggaggctgaggcaggcagattgcttgagcccaggagtttgagaccagcctgtaacatagcgagaccacatctctacaaaac

SEQ ID NO: 332 - DNA, 1473 bp, Homo sapiens
ttcagtttatcctctagaggataagatcactgtaacagtcatactactgtttaaccgataggatactgaggagcttggtttaccaaaatcacctggagagtctgacagaattgagataactatgcatatataggatcatgtattctgttttgatcccgtattctagtcgtaactataaaatgcagtgtttttcattttataataaaaactttaaaacgtctttacttgcttattttaacttgaaagggagtttgagtagcatatgctacctttctgttagtctatattttgtccatgtgcttacaagattctccacatgtaaacgtgaccccattttataattgtaacaacatacccttaaatggtggtactgaacctttacctagagaaatagggaaaatttactgcagaatctttgacctagagaaatagggaaaatttactacaccaattcttttcaattttggagagtttgttttatggtgggtttcttattaacttggggagtagttcatagaattttgcattatatagagtgatgaaacattagaatcaaggcaacgagtataagaaggctatcagaagtttacatgccccccccccattttccccagctaaatcataacataaaaattactgtcattcctttaaaaaaaaataagcaaatgcaatctccttatcaaaatattaagaaggaaggaaggatatagtttcaaaatagtcccttaagttgaggaactctagctttaaacatgttttttaaattttcattttgcttttaaccagtgaaaacttcatatagaatgagcttcaatttgtgtgccagtgtttaggcacttgaggttagcaaaacaaatcctttatactgcaatttgtttcctcatgtgtatttttacaggtgaatatttatcgtctagttacaaagggatcagttgaagaagatattcttgaaagggcgaaaaagaagatggttttagatcatcttgtaattcaaagaatggacacaactgggaagacagtactacatacaggttctgccccatcaaggtggttacttgattattaaaaaaatgtcattttagagtcagtaaactcatatttttgatatgttacatcactgtagatcattgaggaaatgtattcagagttgtactttttatattttggaagactttggactaatttctagttagaagacatacttcaaatacctggtttcatcgctacagatttgtaattttaggggtaatctctttcacttctatgcttcaagttccttattttaaaataaatatactgcactaggcaacatagtgaaaccccacctctgcaaaaaataaaaaacttagctgggcatggtgacacacaactgtagtcccagctactcaggaggctgaggcaggagaattgcttgaacctaggaggtgaggtggaggttgcagtgagccaagataaaaagagtgagactccgtc

SEQ ID NO: 333 - DNA, 2076 bp, Homo sapiens
  misc_feature 1969-1972,2024,2026: n = a,c,t, or g
ggcccacaagatcacatatgacttggctcccagttactgtcttagcctcatttcctctccacctgctcaccctgccccactggctttcttaccattctttgaacaatagagacagacatactcttgcctcagggcctttgcattggttcttccttcttactctaactttctgcatggctcatgccttatttccttcagatcttttggtcaaatgtcaactcagtgaggccttatccaatcattctatttaaaaatagcaatccctcccccaccacacactgcaacccctttctctatttttcattacagcatttatcaccatctggcatatttattggtcaggcctttcaccttgcacccccactccctgttagttccataagagcagggggttttgttaatggctaaatcctcagtgctagaatactgactggtgcatatagcatatacttagtaaatatttgttgactgaatgaacaaatgattgaataacctttttgggcctggtatatttcttgatgctttatatatatttgtttacttttctgcacaacagtcttgcaggatactactattattcccattttatgaatggggaaagttatttgctggccaggcacggcggctcacgcctgtaatcccagcactttgggaggccaaggcaggtgaatcacgaggtcaggagattgagaccatcctggctaacccggtgaaaccctgtctctactaaaaacacaaaaaattagctgggcgtggtggcgggcgcctgtagtcccagctacctgggaggctgagacaggagaatggcatgaacctgggaggtggagcttgcagtaagctgagatcgagccactgcactccaggctgggtgacagagcgagactccatctcaaaaaaaaaaaaaagttatttgccaagattgcatggctagaaagtttaaagcctaggtttattctgcttaatacattgtcaagctcaaataaaatgttatagaaagatggcttatggcttataaatattgttgctttgctgctgaatggagtttataacccacaagcctagaaaccagaagaaagccgaagtctgaatttcctgaactggacattgctcattcactcacttgggagcaagctgatatttgtgactgtgacatacctggaagcctaaaatactcctggaaaaaggcctttgtgtgagttcttcctgtgcaccatttgacccatatttggcttgcatacacagaaagtgaggggggttttatgatgatttggaagtttttctcccctaccaccccagagaaagaccttctttccctagttggggatagtactagtgttactttgggccagttgcttcatgtcacttttctttcctgagttgagtgccagccaaggccagagtgcaaatcattcccaaggtatactggggtatgactttctctttggtatggtgactggggaggccaaggccagagctgatctcaaagtaagatgaaactggggtcagtgatgtctccagggtaaaatgagggtgggttcaagtgccgtcctaatagagctttgtcatttcaaggattctgtcagaaagaaggtgagagagaataaggtctggatccaactccccagctgattgggggtatgggtataacatatctccctcctacagtcccaggtaccagtaactttggggtgagggtcctggtgaagtcctgggcttatgagagacccaggcagaggaagcagaagcagatatattcagtaaggctattctcagtaatatgacagaagtagaatagtaggaggtggaaaaaaagtcatcttatggggctgggcgcagtgctcacgcctgtagtcccagcactttgagaggctgaggcgggcggatcacgaggtcgggagattgagaccatcctggctaacacggtgaaactccgtctctactaaaaatacaaaaaattagcctggtgcgnnnntgggcgcctgtgatcccagctacttgggaggctgaggcaggagaatggcatnancctggcactgcactccagcctgggtgacagagcgagactccatctcaaag

SEQ ID NO: 334 - DNA, 1143 bp, Homo sapiens
gttcacagtcttcactccttcatacccctcactccctgggtaacatcgggccaccagtaatgctggttcctagctctgcaacaccatgcacggtgtagtagctaagagcagagctttcgggtgtgaagtacctgagtacagttcctgccttcccctgtgtgtgcctggaacagagtaaacactcaggaagcgttacccactgctgccattcccagagatgcaaaaggccgagtgtactacttcaaccacatcactaacgccagccagtgggagcggcccagcggcaacagcagcagtggtggcaaaaacgggcagggggagcctgccagggtccgctgctcgcacctgctggtgaagcacagccagtcacggcggccctcgtcctggcggcaggagaagatcacccggaccaaggaggaggccctggagctgatcaacggctacatccagaagatcaagtcgggagaggaggactttgagtctctggcctcacagttcagcgactgcagctcagccaaggccaggggagacctgggtgccttcagcagaggtcagatgcagaagccatttgaagacgcctcgtttgcgctgcggacgggggagatgagcgggcccgtgttcacggattccggcatccacatcatcctccgcactgagtgagggtggggagcccaggcctggcctcggggcagggcagggcggctaggccggccagctcccccttgcccgccagccagtggccgaaccccccactccctgccaccgtcacacagtatttattgttcccacaatggctgggagggggcccttccagattgggggccctggggtccccactccctgtccatccccagttggggctgcgaccgccagattctcccttaaggaattgacttcagcaggggtgggaggctcccagacccagggcagtgtggtgggaggggtgttccaaagagaaggcctggtcagcagagccgccccgtgtccccccaggtgctggaggcagactcgagggccgaattgtttctagttaggccacgctcctctgttcagtcgcaaaggtgaacactcatgcggcccagccatgggccctctgagcaactgtgcagccccctttcccccccaattaaacccagaaccact

SEQ ID NO: 335 - DNA, 2577 bp, Homo sapiens
gccggagactctggaggcgcgaatcaatagagccacgaaccccctgaacaaggagctcgactgggccagcatcaacggcttctgcgagcagctcaacgaggactttgaggggcctccactcgccacccggctgctggcccacaagatccagtccccacaggagtgggaggcgatccaggccttgacggtgagaaggggagaggccaccatccgtcccccgccatgtgacgacaccaagggaggccaagactgaggttcttggggtccataaggctcttcagagcccaagagagttgtgctaagatggcccaggatggaggtccgggcctgccccaagggtcccaccacagccagcgggctggcctcccaccccagcatccatacacgtaggcctgttgctgagggaaggccctctagggtcatctggtccaggggttctttgcttcagctgcacatcggctgcctctccaggaagcgtgttcaacacatggaatcagggctccacccagacctgccgaggccacactcctggagtatctgcatccagagatctgcacgtttgtaaagctaaggggtggtgcttgggctcaggcctgaggttttgcatctgttcaatagcagaggagagaggggtgtactgtctgtggcccccagcatgggccacataccaacccaccatggagcaaagctgattttaagtggtggtagagatacagtttctcttttaatacttacgtgtttagttgggtgcagtggcttatacctgtaatttcagcacttggggaggccaaggcaggaggcttgcttgaggcaaggagttcaaggctacagtgagctatgattgtgccactgtctccagactggacaacagagtgagaccccatctctaaataataatcattattgttacatatttgttttaacatttttttctcaagtataactagtcctatgatttcatagatgtagcttaggataaggccaaggtagatgttgcctatataaggtttttttaaaaaaggaaaaataggccgggctggtggctcacgcctcagcctcccaaagtgttggaattacaggggtgagctaccacgctggccaagaatcacttcttaatgcactgtcccccgattaagggagaagcagcagccaaccccccggctcacactccgggacctgcagaataagagcagcagctgcagctcccccagctccagcgccaccagccttctccacaccgtgtccccagagccccccaggcctccgcagcagcccgtaccaaccgagctctcactggccagcatcactgtgcccctggagtccatcaaacccagcaacatcctgcccgtgactgtgtatgaccagcacggcttccgcatcctcttccattttgcccgggacccactgccagggcgctccgacgtgctggtggtggtggtttccatgctgagcaccgccccccagcccatccgcaacatcgtgttccagtcagctgtccccaaggttatgaaggtgaagctgcagccaccctcgggcacggagctgccagcttttaaccccatcgtccacccctcagcaatcacccaggtcctgctgcttgccaacccccagaaggagaaggttcgcctccgctacaagctcaccttcaccatgggtgaccagacctacaacgagatgggggatgtggaccagttccccccacctgaaacctggggtagcctctagaacagaggggctggggagaggaaggggcagagggaccggtcactgtccagcctggagggaggcattggtggccaaggacaccctttgttgcccatggccattcacccccaggcctggtgcttctccccacacccctgtaggcctcaagtgactcttccccctcctgctccggccccgcccctgctgagccaaacccagtaggaggctgggcctgggtttgtgccgctggggtctccatcaccgggacctggagagggaggggctgtgtagccttggaagaacttgggtcatggggaggaagcacagctgttggggaagggccaggacctcaggcccagccccaaccccagctggggtggggtcttccccacctgtctcttatgccttatgggaaggcccagccataactcgggggccatgctggagctggggaccagcttaggcctcctccataggaacccagtgactggggggtgacgcctacacccccagctatttgcactctggtgtgtggtttgactctgcttttcttccggattggccctgtggtcacagcctcagggggccaggctgggggaacctcacctggcccgtactcctgggggtttccctttgccattgggccccctgagggactgtgggggctcaagggtaatgccagaggcccatggccccagcgaggggctgtggggcacctagagttctcggtgtgtctccttcattcattggcctctgctggggcctcctatgggtgtcttacgtctgtccatccatctgtccgtggtcagaagtggggtcagtgtgtgagtgagagcaggagtatttatgatcatcaaacgtcgtttttcctgg

SEQ ID NO: 336 - DNA, 1215 bp, Homo sapiens
attctcatggtgcgaaccgtaatgtgaactgcatgtgcgagggatctaggttgtgcgctccttatgataatctaatgcctgaagatctgaggtggaacagcttcatcctgaaagcatcccccatccccgtccatggaaaaattgttttccacgaaaccagtcctggatgccattaaggttggagactgctgatctagaccatgcctttacaatctaagtttgctcatctagcttcaagttacaggacagtctgcaagaccaggaacagcataggggttgccacagtggagctccttactgcagtctgcattgccttaactaaaggtggtgtcaggattgattcaaatactgtgaactactttccataaagagaagtctgagctcgtgaactgagattcacagttgtggtacagtaatgttatgtatactctgataaatcactctgagtgtgtttccacttagatatgtggaaagcatactaggcaatctccaatgccctttcagctttaaaatctgtaaattggactggatttggtcatttttcttaaataaatagcatagtaaggtatttgatagaaacattattgcaagttttcttaaggtcttttttttttttttttttttaattttgagacagagtctctgtcaccagggctggagtgcagtgctgcgatcttggctcactgcaccctccacctcccaggttcaagcgatcctcccacctcagcctctagagtagctgggactacagatgcatgccactatgcccaactaatttttaaaaatttttttctagaggcagggtttcactctgttgcccaggctggtcccaaactccttgcctgaagtgatcctcctgcctttgtctttcaaagtgctggcactacaggtgtgagccactgttccaggacaagatcttatttctttgtttgaaaagatccttaatcaggtttttattctctcaaatgtctgtcagaatacgaatttagaataacaaggaaataaggtctgctttatttacttttaagaaataaaatattattcatgtaagtttgtccaaactaactaaacctgatgctgttaatgaaatagggcctgcctttgcataagataattcctgtgtagtatatcacaccaccagcctcttcagcactagtgtactctattgcaattatattttttaagtagagccttataaaattcttttgtctattg

SEQ ID NO: 337 - DNA, 3090 bp, Homo sapiens
ggcgtccatttcgggctacaccttcagtgctgtgtgtttccacagcgccaacagcaacgcggaccacgtaggtgccgggccccctgccgcgcccgctgggggctttcagcctctgtctcaggccggcgctcgcggccaagccgggacctcatgcggctcgccccctgggcaccagggccggccggaggagctggtgacccgggcggctcccgcccccggaaggatttttactgggagaggtaagacaagaggaaacgtttagcatcagtgactcacaaatcagcaacacagaatttctgcaagtaattgaaatccataaccatcagccttgttcaaaactttttagtttttatgactacgcaagcaaagtgaatgaggagagtttggacaggattcttaaagatcggagaaagaaagtcattgggtggtacagattccggcgcaatacgcagcagcagatgtcctacagagagcaggttcttcacaagcagctcacccgcatcctcggcgtgcccgacctcgtctttcttctcttcagcttcatctccactgccaacaattccactcacgctttagaatatgtgctcttcagaccaaatagaaggtataatcagaggatatcactcgctattcccaatctaggaaatactagccagcaagagtacaaagtgtcttcagtgccaaatacttctcagagttatgccaaagtgattaaagaacatggtactgacttttttgacaaggatggagtaatgaaagacatcagggcgatttatcaggtttataatgcacttcaggagaaagttcaggcagtgtgtgcagatgttgaaaagagtgagcgagttgttgaatcttgtcaggcagaagtgaacaaattaagaagacaaatcactcagaggaaaaatgaaaaggaacaagaaagaagattgcagcaggcagtgttaagcagacagatgccgtctgaaagcttggacccagcgttcagtcctcggatgccgtcctctgggtttgcagctgaaggcagaagtacacttggagatgcagaggcctcggatcctcctcccccttactctgattttcacccaaacaatcaagaaagtactttgagccactctcgcatggaaaggagtgtctttatgcctcgacctcaagctgtgggctcttccaattatgcttccaccagtgccggactgaagtatcctggaagtggggctgaccttcctcctccccaaagagcagctggagacagtggtgaggattcagacgacagtgattatgaaaatttgattgaccctacagagccttctaatagtgaatactcacattcaaaggattctcgacccatggcacatcccgacgaggaccccaggaacactcagacctcccagatttaactaaacaaaagaaactctccacctagcactgtttttcttcattgcttactgagagggtttttgagaacttaatctggggggagaactgctttctcagataccttaactcccgagaagagagtccttgtgcacagaacttgtgggagcctccatccgctgctctttacctttggatacagtgtgcaagtttcatgacagaatcattaagataatcaaattgtcctaattctggtgcgattcatggatatactggtaaatttaggcaaagtgaaacttatcagcgtagtttctgttctttaaaataaattggaaattagagactaagcacaattagtctataaatgttctataaatcaaaaacttacctcttgcactatcatgccttgaaatttactttttcaaagggaaacaagtttagcagcagccttcaaagaacttctttctatgatgagccaaattcatctttgccagaaaagaaattttgataattccaagaagcctgattagaacaaatcagatataccttctcttgtctgcatgactttgtgagataaaagagagggcttccaacttttttctactagcttgatatgtattatcacttaaaatggttgcctttaaaaaaaaaaagtagagatactaattaccagtaagtaatcatccaaataaatacgtcataaaataaattaattattttttctttgatggattacagtgactactgtgttgcactggcacatttatggtctctgttctggaatcttggaggacacacagcagtggagaacagaaggagtgagttttataatgaacagattccagacacggtaggtttagctgagttcatacagaggagatataactcatttagatcttctgacaaatcctagtgttagttttatctgtggaggaaagacatttaataataaactgtttgggaatcttggtgaataaagattcattttcaagctgaataaccatacttattttattttaagttgccatttggggaataattgcagtatgtgtagagactctcttgggatgcacttatatttttatttaatgactacttgttttctagttttgcccacaacgtctgaaaccactaagacattcaggagcatgttgagcttctggtttggaaacagcaagacccaccatttatgacaaggacagccatgaggttaatacttggagtttaactgccttccctttgaactagttaaaatctgtaagaataaggaagttgttgaaggcttaaaatctgggttctgaaaaagtagtttcagtttataggatacacatttactcactgagctccagttccaatactaaattagacagtatcatatagacggaaaatgaaatgctagaactgccgttctttggatcgccactctatgggggtctgtcttttaactactctcctggttatgttggccttacaccactgccatttgatttaaaacgctgcagacactttatctgcaaatgtgttccagttgttatcagctacctactacgcagcttcagcgccagtgtgaatttatttttttttaagtgccattaccgtctcctctgttcagattttgacattcaggaaaatatttttattttgatgccatactgaaatctacaatgtatatctgacaaagcagttaaatgtgacaataaaaaacttatttaatcatgg

SEQ ID NO: 338 - DNA, 2594 bp, Homo sapiens
ccatctccattcattccgggaagtctctgagttctttaaggtccacctcacatgccgcctttgattcctccctccttgtggcatgatttggccaagtagtgttattgaacacttacgcgaggctcacaagagcaaaagcacaacagtcctgcctgaggttcctggtctgggggaggaacaggccggcctgctgtggcctcagagcagacccagaacactaggagcccagaagcctgacttgggtgggacacagtgaattctcaagcacttctcctaggggacaactccagctgggtcttgaaggctgaataggagttgcttgtgagggtgaagcagcaggcagcctgtgcggtggttgctcagggcctgagggtagtgatgctggggagtgctggcggtggaccctgctggaacgctggtcaaaagagtgggggcagtagccagagagaaaaggctgggccttctttctgctttgaagcccgtcattgtgctctggcttgtgttattagtacaacaggggcctctcacccacacaagcccctcgagggtgggcttcagggagccgagggcagtgaggagagcaccgggtctgcggcctgtcaggccccagctttgtacctcactaggttcgtggctttgagctcatttcttattttttctgaattggtctttcatctgcaggaagggactgtccctgcctccctctgagggccactgtaaggcaggacatggattgcctggggcagggccagccacatagtagatgtggtctctgctgggcacaggcagcgagaggagggcacgcaggtgaatccagagacttaatggccaagcccctcaccgcctgccaggctttgatcaaagctgtgtccgctggccggaaagtgtgtggcttcccctccaccaggagtcttggattctggcccacataggaagatgagcacatggtggataagtagaaactcccagcctggttcccagtgtgattcgtgagtgggacaaacctcagacagctctgcccaccgaaagaagcgtacacgttcctggcgtgtgctgtttgtaacctgcgaaggcatttgggggaagctcagttccccgccagataccgagcggtgcttggaagggcccaggagaagagaagccaagaaagcccgtagcaaaggaacagtggagatgtgcgccctggactgacttcttccttgtgcacatcactgcctgtgtcaaaagtagatccagcgcacccctcagctgtatacatttgtggagctcacatttgtgtggtttgctgtgctgaaacttaactgtcttaaagacccccatttccaggaaactgccaagaacttttgttatctaagagtgtttgtaagatactcagataggagcagtgtattgaatgaaagtttatctgaatagctgctgttttccaggccccacatctgtagaatgaatgttgaattaagaggtctactagactcagacctggaacccaggattgactctcaaccccactccttccttgttaaggaaatgggctcagggtccccttgtccgtccagatgagattaggcatgtcaaagccttggcctattcccagcctatcttgattcatggatttttttttcttatagcagagaaagtccattgtccttgcccgattaaaaagggtgaagatgggctgggcacagtggctcatgcccgtaatcccagaactttaggaggccgaggcaggtggatcacctgaggtcaggaattcgagaccagcctggataacatgatgaaacctcgtctctactaaagatacaaaaattagccgggcgcgatagcaggcgcctgtaattgcagctacttgggaggctaaggcaggagaattgctgaacctaggaggtggaggttgcagtgagctgagatcgcgccactgcaccccagcctgggcgacagagtgacattccgtctcaaaaaaaaggtgaagatgataaaaaaaaaagtagaggaaaaacttcctgcctcggacttccctctagattgtttgcttgggtccagatgcctgaaagagttttggttttagaattccatcctaatgacccaggtgcctttatctgatggttctcatgtatgtttttgctaaccaggagctgagagaagataatatcattttaattgaaaccaaggccatgctggaggaacagctgactgctgctcgggcccggggcgataaagtccatgagctggaaaaggagaacctgcagctgaaatccaagcttcacgacctggaattggtactgcaggctgtgttgttactacattgaaaacagattgggctcgggcacagtggctcatgcctgtaatcccagcactttgggaggctaaggtgggcaggatcccttgagcgcaggagttctaaccctggcaacctagcgaggccccatctctacgaaaactaaataattgggcatggtggtgtgagcctgtagttccatctacttgggagagactgaggcaggagggttgcttgagcctgggaggttgaggctgcagtgagccgtgatcacaccattgcattccagcctgggtgatagagcaagaccttgtctcag

SEQ ID NO: 339 - DNA, 1062 bp, Homo sapiens
atgagtacccagacctagtgcacaaggtgatcatgatcaatggcgggggccctacggcgctggagcccagcttctgctcaatcttcaacatgcccacctgcgtcctgcactgcttgtcgccctgcctggcctggagcttcctcaaggccggcttcgcccgccaaggagccaaggagaagcagctgttaaaggagggcaacgctttcaacgtgtcatccttcgtactccgggccatgatgagcggccagtactggcccgagggcgacgaggtctaccacgccgagctcaccgtgcccgtcctgcttgtccacggcatgcacgataagtttgtgccggtggaggaagaccagcgcatggccgagatcctgctcctggcattcctgaagctcatcgacgagggcagccacatggtgatgctggaatgccctgagacggtcaacacgctgctccacgaattcctgctctgggagcccgagccctcgcccaaggctctaccggagccactgccggcgcctccagaagacaagaagtagccgctgggccggcggggcatcgcttggtgagcacagccgcagcaggaggaggcccgagcctgcgccaggtctgcagcgcagaccacctgggcgggccgttcgctccggtgggcggggccaggtcagggagacgcccccaggctgcctgggcggggcgtggcatccgagggagcccagcggacattccgctctccgcttccgtcccgcggggcccatcggcgttttggggccgcagccgggaccctcacggaagatgaccttgtacagaagctctccctcaccttccccccaacgccacggccaaggcaggccccccaccccgctgtcttccgtgtcagccgtgcttgatcctgggacccacgagccccacagggaccctcgaggccccatcccgttatccgagacccttcctaccccccattcctcggcgctgggagctatttttgcccaagggggggggatgggggggctggcgccaccgaacctgcacatctcaacttgtaactcaataaacagaagtgacaatcgg

SEQ ID NO: 340 - DNA, 849 bp, Homo sapiens
gggattactgctcctctgctctaaaattggtgtttgggtgatcagaagcaggtagccaatgggaagagcacttctgagtgataactaaagcagtttggtggccttttcacattctccaatgttcaaacatattttccactttccattttctctttcacctcattttgcctctctatcccccatccctgcttatttcttaagcccattgatggcactcattaaattgtatttagggctaatgagtcattgttccttaatatcgttttcaatatgccacaatttaggacacatttaaaattttctaaaacaatatcctaatcaatattgactaatttgagccacattcccaactctaactcagcacacactgccagtcttccccaatatctgtctcctctcaattccccaccacaccttataaaattgtaatcaaagatatctcactctgtcattgttaatctaagaataaaaacactgactttaatacggttttactaagtttcaaccttctaattaggtaggcctctaggtattctgcagatcactgctggtcttgatagccattaatatatgtttgtattatgttatttttcaactaaatcgcagttggaaaaaaacatatttaatattatgcccttggatctgttactgcatcactagcacttgtgatgcaatagaacacttcgcctgtactgaaagggccaagagtaaatgccttgttttgtttttttgttttgttttgttttgctttttgttaaaacatgtcaatagagttggcagttaatgctgaatttgtcaaataccccttccaaaattatacttgtatttaaaaaataaatggatctacct

SEQ ID NO: 341 - DNA, 2678 bp, Homo sapiens
gtgtaaaggtgagtggcgaggggaagtgctgggggaagaagggccgggagggctggggcaggtgcagacggatcccatggtttcctttttggagtcagaacctgagcagtatttgcaagcatgtgctgatctggaagtgagagaagagggttcttccagtctggggaggagggaaggcctgaggctggctcatcggaggcgtgagtcttcggccctgccatgcctcacatccccaggatgccgcggtgggaactgggctgtggctttcctgccctggcactgcttgtttgctgggatttcaggaggaaaacccccaagctccgaaagaaaggtatttcttttttattttgtggttcacttcttccactagaagactcgtttcccagagcctctaccctctcctgtcaggggtggggagcgcttctggaactgataccctgggaaggaggtatcagtgctgagcgggcaggcacagtgtgtatgggggtggggagctctccctgaggcctgggctgggctagaggcagggtggggaggggctcttgtcctgatcttaggagtgtttcagtgatgacaaaggaggaccaaggtagggagggaggtgacagttgctctttctatttccacttccccaaagcaacccagtttcctggagttttccagcaaatctaaggaaggggttgagggttaaggggtggagatggattgtggggagagctagggcagttactagtgtggtagtgaggcctcacccttctgtggttgttcaggatggggtccaaaattttaggtctgaggactggagacaaggcgaacatggtatgaggggaggtggggctggcatgggctggcatggtctggcattagaggaactcccttgagactttatgatctctgaacttttattccattagctttaaactctaaagggaaataaagcactgaatatagaatcacagggtaaatatgacctcggaaaaattcctgactcaaatctcagttttctcatctgtaaaatggaacaataatatttactttgtagaagttctcatgaggactaaatgagatagcacatgtgaaagtatctggggtcagttctcagcataaaattaatgtcattaattacattggttaatagttataattatcatattacatatgttataattacattatggtaattatattacttacaattattataataaattcatgaaaatttatacctattaagatggaaatgttctgctaatggccaaaggggtgacaattaggacccagaggtcagacactggtataactcaggaccaggtctttggagttccagggatgtttctgattccaaactcctcatgtgatctgagattaagagtgacaaaacctgacttagccaagctaaaaaaaaacaaagatgatttttctctcatgtaagaagtgacactgttggtcctgatgtctccagagcatccagtggttggttcttgttgagagaatagctttgacggatttctaggctgcagatgtcaagttcaaagtcttcatcatatgggtgatatttaaagtggtgagactctgagaaagtgtgcagatgagggagggaggccctgggaccctccaacatttagaggacagcaaggacaggaagaatcctcagaggaggctaaaagcatctgatgagacacacggagaaccaagagggactggtgtgccaaaagccacatgagaaagtgtcccaagaaggagggggtggcttgctgtatcacttgctgctgatagagtagttaagatgaagacagagaatttcatctcagattttaaaatgtaaaggccattggtctccttgacaagaataggtttggggaagtactgagcagagaaaaggggcagagaatgggaggaatgggaggcagcaggtagtgacagctctctgaggtccatcacataccaggttctgaaaacagatgctgagccagatgaactgtctgcctttgaggggtccacagtccagtggaagagagggatgtttaagtgaatcatcataaaattacatgacagtgataacatcgaggaacacacagggagctctatgagtagaggaaagagtgaccagttttctctgagaagacatccaaattcagaagactgggtttccaggtggagagtaggaggaagggcattctcttgagaattttttaaaagcaaaaaccatttttcattcttcctttcatactctctaactatcaaagagcctggcccacagcaaatgctcagcctacatttgttgaatgactttgtgaattctggtggaaggaatttgcaagaaacagagttgcaaaagaaaccattataacgatataggcagcagcagtgagaatagggagcttgtttaaagcatatttggaatgtaccaacctaggccgggcgcggtggctcatgcctgtaatccagcactttgagaggccaaggtgggcagatcacgaggtcaggagatcgagaccttcctggctaacacggagaaaatacaaaatatcatccaggtgtggtggcacgtgcctgtagtcccagctactcgggaggcttaggcaggagaatctcttgaacccgggagaaggaagtttcagtgagccaagattgcgccactgcaccctagcctggatgacaaagcaagactccatctc

SEQ ID NO: 342 - DNA, 1753 bp, Homo sapiens
gtccacaagtgaagacctgttcagatttttattaagtgttgccacatacaaagttgataccattggatgactggcctccatcacaggtgacttgagtacttcattggtttgtgccattagcccagtcttctcaatgcctttcccccagacttcaacccaggaagaataccttttgttccactcttctccccatctgaaagtgtttttgctctttattaaaaccacgacagtgttatatgctaggatctccttggagacccaaagaatcctgggactttcagacatcaccagcagagcatactgctgcttctcaaccaactggaaagacatttcagtggcagacagccggccctctgtgggtccaaacagctctgctttctgcctctgattgcctatgtgctgtgggccacaacagaccctgtggagtgtctgtctctaatacaaacaagtacctggcagccaggaaggaccatcacgtaggccaggggagcgggggccagccctattctataaaacagttctctctaactttactctgctcagtgtacaaatagtgatatagagcatttggggaggcagaaagggctgagtgcagccagagatcctgcctggagctcaggccacctggccctgcagcaaacctagaccaccaaagcagcaccatgcctcagccctgctctgcacacaggcactccaaggctgagtggtggggtgtacggcagtagagggcatccctgggtgaggctcattttcctagtttaaagtttgcttctgccataaggaagcctgcccttgactacacaggacacagggatctcccttctctgcaggctccctatccttttgcgtttggtcagtgcaggcaggcaggggcaggggactgaagatctcatcaatggtgttatggaaaagactaagtttcaattgtgagaacttgggagaagccagttggaactggctacatcttaaaattttatggcctgggtgcagtggctcacacctataattctagtgctttgggaggccaagagtttgaggccagcatgggcgacagagagagaccccatctctataaaaaattttaaaaattagttgggcttctgcttgagaccaggagttgagactggaaccactttgtctccattcaatccaagttttcctggatggaggtgactctctttttgggggtgacacagtgacccaggctccttccctccttgttcctgccatcttcagctcatgcctgcaaggtggtcctgaggacagtctccaaccaccaggttatctcttgaagcgtgcctctgtggagggagagggtcttgcttttggctaaatttgccacctcttatttcttaaaaccacgtctcactcccttggtgtctctctgtaactgaggcttagaagctccttgttcattctttggactctttctcagtccctttgtctacaagggaaacagagccatcagcagaggccagtctgggggttataaggggcgtcgggattcaggccacaggtccccccatgaatggacagaatagaggctgtgactatgcttgatgtgaggggaagaatggccaaatgcctgaggtgatcattgtttcttaatttagaattcgtatatttattttaaaaaggacttgactgggtgtggtggctcccagcactttgagacaccaaggtgggaggatcgcttgaggccgggagttcaagaccagcctgggcaacaaagtgagatgcccatgtctaattt

SEQ ID NO: 343 - DNA, 2053 bp, Homo sapiens
gagataggagaaagtgctcatttataatgtgtattctgtgcagctgttctcagacaagaccggatcttgtcatcttaccttttgctttacaaaaaaggcctgttgaagtcaatgctgtcttgccccttgctgtttcagcaggttagactttggtcttcactgcttatagctgcattggaggccaatgtagctgatgctcagggtcaggcctcgccccttcgccgcaggtctcaggatcggggataacatcgctcccaccctgctcatttagagatgggaaacaagcaagagcttgacttgcctcccatccctcagcctgtctgtggcagagcctgcaccaaaacccagagcttcttccctccgtgagggccacgctgtcaccacagtcctcccagatgggttttggattagcatcagtcctgtgtcaccaagtgccaaacagctgaggggtagaagtgggactcctttcccgagccccagcatgaggctgtggtgtcaggtttaggcctctctcaagtcaagaaaaccccgggctgagacctccacagacaagggctccccatgctggccattggcaggggcccaagaagttcaatgaccaactggtccttccacaccacaccagctggtgctgccatgtctgtcgaatcataacggaaaattcccagatcacgtttggatttaaaaactcatcccttgtcgtgcttcaatgcatgccatttgtcacttaccatacttcccatggccgagcttcatgtcacatggcctggcgattgtgcttgttcacactggggccaggattttcatactaaaacgtcactgacaatggggtacttttctcctgaatagctcctctgggcttgtgcagttctagttttcccagtagttccatggcaggttcaacctctcagtgtcctgaaaaatggaaccacccactacccatatgcctggctgcccaggtggctgcactccggggatcacctttcagtactgagttccttcacgcacttggttcaccaccatcactcttgagttttggacaaaagaggtgggtatgccaggcacagtggctcacgcctgtgatcccggcactttgggaggctgaggcgggcggatcacctgaggtcgggagttcgaaaccagcctgaccagcatggagaaaccctgtctctactaaaaatataaaattggccgggtgtggtggcgcatgcctgtggtcccagctactcgggaggctgaggcgggagaatctcttgaacccgggaggcgaaggttgcaatgagctgagatcgtgccattgcactccagcctgggcagcaagagcgaaattccatctcaaaaaaaaaaggtgggtaaagggccatgagcccaaaccactaggttgttcaccttttcatctgaaaatgctttactctgactatgtgctattgggttttatttccagaaaatatagttctccttttttctgcatgaaggatacatcgtggtgccacatgctttaagcaatttaaacaagagagataagaggaaaatgcaaccaccacatctgacttgcccaatgtagactttcctctattagattgaagtacacaacctaatatgatatattattttgtagtatctcagactttgtaaataaataccattatttttatatggaaattttatagaagagctatttctgtatacgtaattactcctgattttctgaaattgcttctggtagataacagacaagtcctaagcagtgttccactaagggtggttccaggcctgcctgccgtggagttgactggggggcttttacagttttgcgatcctaggatgcgtcccagacgctcagtcagaagtgctggaggtggggcctgggaagctgtatttgtaatgaactctggtgttttttgtccattaaagtgtatctttgtccatcctataagattaaaggaaagaaaaagcatctcaaatgagtgtaagttgttcttgagaaaaaaatgtatcagacttttatgatttgaatgaaatgtattatagaaaaaaataaacactttaaaat

SEQ ID NO: 344 - DNA, 1917 bp, Homo sapiens
  misc_feature 1867: n = a,c,t, or g
tggaggatctgttgtttttcagtttttctgttctgagaatggaggtgagagagcagctttggcgtggagagcgccgggaggaatgggctgtccttggaaggtgtgggttaacaggggtgggagtctgagggtggcggtgggtggagctggaggatgtggcggcctcacttccatacctgccctccccagagctccgtgcgccaggaaaacgtgacggtgtttggatgcttgactcacgaggtgcccttgagcctgggggatgcagcagtgacctgttccaaagagtccctggccggcttcctcctctctgtcagtgccaccaccagggttgccaggctgcgaatcccattcccgcagacggggacctggttcctggccctccgctccctgtgcggggtggggcctcggttcgtgcggtgccgcaacgcgacggccgaggtgcggatgcgcaccttcctgtccccatgcgtggacgactgcgggccctacggccagtgcaagctgctgcgcacacacaattatctgtacgcagcctgcgagtgcaaggccgggtggagaggctggggctgcaccgacagtgcagatgcgctcacctatggattccagctgctgtccacactcctgctctgcctgagcaacctcatgtttctgccacctgtggtcctggccattcggagtcgatatgtgctggaagctgcagtctacaccttcaccatgttcttctccacgttctatcatgcctgtgaccagccaggcatcgtggttttctgcatcatggactacgatgtgctgcagttctgtgatttcctgggctccttaatgtccgtgtgggtcactgtcattgccatggctcgtttacagcccgtggtcaagcaggtgctgtatttgctgggagctatgctgctgtccatggctctgcagcttgaccgacatggactctggaacctgcttggacccagtctcttcgccctggggatcttggccacagcctggacagtacgcagcgtccgccgccggcactgctacccacccacgtggcgccgctggcttttctacttgtgccctggcagccttattgcaggcagtgccgtcctgctttatgcttttgtggagacccgggacaactacttctacattcacagcatttggcatatgctcattgcgggcagtgtgggcttcctgctgccccctcgtgccaagactgaccacggggtcccatctggagcccgggcccggggctgtggttaccagctatgcatcaacgagcaggaggagctgggcctcgtgggcccaggaggggccactgtcagcagcatctgtgccagctgagaggggctttgggcctggccctgaggggatatgaatgcttcctagagttctttctgggggtgtggagccctcttagaaggagacaggctgtatttcttgaggacatggagtctttctcaaggacacaaaactcttccagggacctggagcccttcccaggacatggagaacttcctgagggcctggagtccccctgcatcatggagtccttcttaaggactggagcctatgcaggcacagagtccctcaggaccaaggagtccctcctgcaggtgtggagcctttcctgggatgcagagccttcccaagacatggattccttcccagggagacaaagccctgtcaggagcacagcatctttccagaggaggtggagtctatcttggggaaaccaaatttccaagattttcccagaggctcagcaactctggcctcaggcttccttcccagaggcagcgtctgggctgtgctgtgctgtggaggagggattgcaggatggatggagctgggactggggctgtctgggtggctggtatcntcgtttgatacaggtggagtctgtgtgtctccagtgattgattggttcag

SEQ ID NO: 345 - DNA, 512 bp, Homo sapiens
gagcacctgtccatgtaagccatatgccacccccacagggcctggcaaggtgcagagggtgcaggtctcggccatgtacccctttgcccctttctgagaggggcagatgcccagcccagtgacccagagcctcaccccaggaagcgggtccatgcagcaaatcagccaggcactggcatggtggcccccaggcctccaccgcctcaccagtccctgttcaatctgctgataacgcctttcctcccttgcaggtctgtgcagacttttgcagacaaatcaaaacaagaagctctgaagaatgacctggtggaggctttgaagagaaagcagcaatgctaaacctctgtttcatgctaaccagacacgccgtgcactcgttagattcctttcttagaaaactcgttttctgctcccttccctcgtcccttccctccccgacaggtcacataacagctgcatcattgaccgcacagcgccatctctccctgagaataaagccgatagccaccctc

SEQ ID NO: 346 - DNA, 1814 bp, Homo sapiens
aatagacattacatttattgacttgagcatgttgaaacatctttgcataccagctgtaaatcttacttggccatgatgtgtaatcctttcaatgtcccactgaatcctgttggccagtattttgttgaatattgatttaaaaaaatcttgatcaggaatactgatgtgtggtgtttttttcttatagtgtctttgtctggttttggtatcagaataatgatggcctcatagaatgcatttggaagtgtcctttcctcttcagttttttggaagagtttgaggagaattgatttaattcttcagatgtttgccagaattcccatatgaccctgggcttttctttcttgggaggcttttctttactacttcatgctcttgactagcataggtctgttcagattttccatttcttcatgattcaatcttgataggctgtgtgtttctaagaatttgtccagttcatctaggttatccaattctttgatatgtaattgctcatagtactcttaatcctttttatttctgtaaaatcagttgtaatgtctcctcctggtttttagttgtttttcttagtcactcttagctatcaacaaactcttggtttcatttatttttctctattgcttttctgttctctattttgtctctgctctaatctttattattattataatcatctccattctgctggctttgggttgattgctcttctttttctagttctttcagatgtaaatttagggttgacttgagatcttaatttgtttaataggtgtatttacagttacaaatttccctcctaccactgctttgactgtacctgtttttttgtatattacatttttcatttaccacaagatattttctaatttcccttgtgagttccccattaatctgctggttgagagcgttgtttaattttcacataattgtgtacttttcagttttttgtctgttactgatttctagtttcatcccactgtggccagaaaagatattttatttcctcagtcttttgaaatttgttgacttgtttagtcatctaacatactgtctatcctagagaaaggtccatttgcacttgagaaaaacgtgtgtactgctgttgtgtctgttaggtccagctggtatgatgctgttcaagttctgtcttgcgactgatcttctgtctggttgtcctatccgttactgaaagtgggctactgcagtctcctactcttactgtagaactatccatttcttcctttgattctgtcaatgtttgtttcatatattttgggctctgatgtttggtgcatatatattacatcttggtgaattttcaaactttttaaatttcaacatgaagatgaaattataggatgtctgggatttcctttgaatccgtggggctgggagtaactataaatgaaacaagattggccgggaatttgaggctgcaaggataggtacacacaggggagtgaagcagggcttggagcagatggtaaagattgttggcttttccagccatggggctctcttgccacttggcagtagtggcatgaagccgccaccagggggccacgcaccagtgcatgtggctgtgttccaaactttttggacaataaaatctgaatttcacatacttttcttatgtcattagatattacccttttacatcttttcactatttaaaaatgtaaaaatcattcttaacatttgcgctgtgcaaaaacagctggtgggcccaattttggcctgtatttcacttgccaacccgatttatacttttgtatctatttgacattttccattaaaagttatataacact

SEQ ID NO: 347 - DNA, 1733 bp, Homo sapiens
  misc_feature 314: n = a,c,t, or g
caccagtagcctcctatctgcaatcagagtagtgctctgctctggggaggggtcattggaaaccataatgcagagtgggccccctactccatttcccagcaaaaggctccagctggagggatgggttgtggggcaacctggttcctgctaactgccagattgaatgtgtgggctagaatgcctgcacatttagttaaactgggctcagcatgcttgtcctcaaaatgtccatcctggtcacagcacacaagatggctattggtctgcttttaccctaccctgtactatacatgaaaattccagttattaacacnctcaaactggtggagcttgttcaccctaggaaggggattgtatatatggcaggcttccctggtgccgatgtaaagggctacatttgggaacatttgacttccttgggactcttaagtgcatactgatggcatgaagtaaaaggggcctcaatgatgataggaaaatcagttcttttaaaatttcttcaagaaaatccaggctatcacatagtctttctgtgtgacttattaggagataggaagagcattgggaaacttgcacagctagctatgcatctacattttggtttggggttagttatgaaatgttcttaatatgacgtgttcaataacttcacataaacttcctgttctccaaaacctcaaagagatagagttaatgagttgttgtttttttttaaatgggggtagttttctatctgtcatgggctctagcatctactccgctacccaattctgtcatctccaagctgagtttcctcttctgaggcagaggctggagcagttctttttcagttctcatcctctccatcccaatccagtatatcaatcaactctaactcggagacgtctagctggcaatgtttctaaaactttcactggatttctttagacattgaagcaaacatttttttctaagaattgcttctcagatgatgatatcaaatgtatatgcttttgcaagtttgaaaagttcaaattaaccacttttgactaggtaagtctttctaaaaaccatttaaagctaactgggtcttagcatcctcctgtgtatggaagagacaggtgaccgctccaggttgggtgctcacagaacccttttcctgactctcatggaagatggtggaaggaaaatagactgtctcatcaaccctcctgtgtcctctgaagcaatctcagtttttattaaccacctcttctgtgtttctggtagctatttaacctgtatttaatctgtacttcctatgccagcctcaattttatttgatttttaaaattattctcttctaaccaatgaagtgtttgtcagtatgccccaaagcttgctcttttgtgctcccttttgaataactttctatccagaaaaagagattatttgggacttgagatttgcagtgataccaacttatagcaatgatgtactttaagggaactccccaactatgttgtgatagaagaaagagaaaccttcactttggcattttttttaatcactgtttatttttctgtttgcggcccaggaagcagtgggaggtggtggcagatatgctttgcatatggattgttatgtttttatttgggcaagtttaatcatggaaaactcaaaaagagggggggaaatggtcagtttaagccaaaagaaactttctaaacaatgtataggtacacagcaaaattaaacaaatccaacaatttctg

SEQ ID NO: 348 - DNA, 3032 bp, Homo sapiens
  misc_feature 2812: n = a,c,t, or g
gcctcctgagtagctgggactacaggcgtgtgccaccatgcccactaatttttgtgtttttttagtagagagacagggtttcgtcatgttggccaggctggtctccaactcctgacctcaagtgatctgccggcctctgcctcctaaagtgctgggattacaggtgtaagttaccttgcccggcctagtacagtttcttatatgatcaaatctattagatgatctattggttccatattttctccttggagactatccttcaggacactttttccttcttgctgtagtttgaactagttttctccaggcttgctacagaatggttgcctggaatttccctttgcttctctcctctaatggatctgtttcctggttctcaaattttttttctttcttggcttgctccttcattcaagagtagttgtatattggaacaagctttcatgtaaagactacatgggagataactttttgtagatcttctggtgatttccaaacagaaaagtatagatctgggtcctagtgtgaatctacacctttgtagaataagactacaaaagtgagagagatgacctgaatggcttccactccctccatctagctctagaattctagtattgtaagtacttgggaattaagttattttacaggttatctagcatatggttaaagcagcaagctttcagggatatcctttgtgagactttgacaaaaaagacatatggcttcttttttcccctccctttaaaattgaactttaagatttttttaattgaacttaaagatttgcttttcttttctttttttctttcttttttttttgagacggagtcttgctcagctgcccagctagagtgcagtggcgtgatcccggctcactgcaacctctgccccctgccccaggttgaagcgattctctgcctcagcctcccaagtagttgggactacaggcgcgtgccaccacacccagctaatttttatatttttagtagagatggggtttcaccatgttggccaggatggtctcaatctcttgaccttgttatctgcccgcctcagcctcccaaagtgctgggattacaggtgtgagccaccgcacctggcctctgtcctcttttagtctagtgtctggttttctagcaaacagtaaatttaaacaagtaaactattatggtttccattgcttacaaaatgattttcctttacattcttatcatgaacactattttaagcatcaaatgcaatcatctaaaatataaaggtcaatcatttataatagaaacaccttgaccacaagcccttgattgaacattttataatatttcatctacttattaaaacaaataatttcccttgggttggaggggaagtgatttcataaattaattagaaagccatctttagcatattgcttatgtctggatccatgtttctgaggaaaaagacattctcaggtgatgtatttttctcatgcattagtatgcatttttaaaaaataatgcatgtttctttaataattaattttcatcttctataagatgccatgtgaagaagttgtggaaatgtagaataaaaagctaaagctgccaaatttctgttgaactcttaaaaacagctcatgtttgtttgtcctctcgggttgtggcctagcctatttgcaatgtaatgaagctgcagggttcttgtatagctaaagcgttcaatgcatttcacgtgctgtggtggatgtgggtgctgtagacaggcttcttctcttcgtgctctcaaaatacctcggcttgacatttggacagatcctgtcattgtttaagctgagcaaaaaaccacacaaaagttgtgtaacgagatgagataacaaaggagcgagagaaatctcatgtgaatttccaagttttaattcgttctccatgaaggattttcatttcagtgaaagtcgcagcagaagagggactttctggagttttgagaatgccaaacccacatttttatcacacttctttggaaatcaatgcctttgcatagaaaatcaaattcagggaccacaaagaattttcaggggaatgtctagtctgaggggtctgaggttgtttttactttattgtgttgtttaaatattttaaaaatatctttagcgtttggtcttttttttttctgtaaacatttaatttggtctgagaaaagctgaatgtttgggtgtacgtttgactaaggtggattgggcctgcctgtgaacattagtgaacaggtggtaggcttcaggaatatccagttttaatcagttgcatttggtacagaattttgagtaatggtgaaaattgttgtctttggaaagcacaaaagaaacctggaaaggcagttcggctcaggtagctacacataacattgtgtatgattttcacttcaaagctgtctggaaggaaatgcagtcagctccagctagtactatttatgtacccagataactaagatattgtttcatggccttgccttagtcagaggcccttttctctgtcctgaacccccaggtatgggtgaaattggaaattactaatctattggaaatcagttcctgacatagtaaagtttgctttcataactgcagcaaaaaaggtcaacttgccaagtcactgctgccatgtgtgtactgtattattttcagaaaaaaatataatagtctgagtccaagttatcttgatttaaaattgatagagaaaagaaactgtcgagcaagttatataacaactaacaacattgcactttctgtatatgaaatcaatatttaaataacttatttttctccattgctgttctnaagaaacattgtaagtagctgtaatataccagtaccaatatgttcttgcaattgcttcagcccaagaaagctgtgtattgttttaaaaattgtaaaaattattgtgatgattcatttagcataaagagaggtggacggaagggttttcctatgtatcaaaacttgtctataattatgtcatctatgtacctagaaaaaagtaaataaatttcttcagttg

SEQ ID NO: 349 - DNA, 1767 bp, Homo sapiens
atctctaaagaaatctgttcaagaccatgctataagacactgtcagctaatggagctgggaagggtctactctgctgacagagcatttccttgggtgatcatagtttcgaggtagagtttatgatcattcatagctttgtctagaaggagtaaaatatcatggccttaacacaaagggtgctgcgtagaatatgaattgattttggaatcagaacacaagcaccatactgaaggactagcagccaaataactgcctaggatactgatggttgtgaagactgtttcaaatgattggatctttgaaagcttcagcgtgccttagtttctaggatcagaattagttttcctctcacttggccttgcagctaaatggagaaatgtttcaatttctttgaatacttgcacatttcaataattcctttcccgagtataaccactcaagggggagcaaatttggatggatttacgacttcacaggcattgtgaggaaagagcattttccaaggctgttttgataaccctggggtgataagcagtgagccctcacacacttactttgacaatttcacatgcacttgtacttcattatttccctcttcaagagtcgtttctattctagtttctgccccatcccggggaatcctaaaggagaattaattcatctaagtaatctcaaaaaactgtaggaagggtgctctccctgagaagcttctcccacagtgctttggtgctgttaccttgaggtggtttggacagtcacggaagttttaggctgtgcatagtgatcatctgttaattttaaggtctttatcatttaaagaaacattcctcagtgtaacatttgggaggggattctttcctcttgctagtttaaaggtgtgatttgtactccttgtttgtcccattcatatatgaaaatagacttttaaaactgtccaacactaatggtttatataacatgcttcccattttttttatgtcgtagaaattggaagttagggagtactgctttcaaggttcaacttcattatcttctgcattggaaaatatttgggccatgagaactaggggaaaggagtttgaatgtgtctatttttttctagtgaatgtattttaaccacagtgtcctaaactgagaaaactagagaggaaaaagtgggtgttcatgaactttgtagttgggagagtggttttacatgtctgtgtattcatgactttgggagtgggtaggatcattggagagagaattgcacagaaagtcctgaagtttaaaacacttttgaccagctttggctcgggagagtggggctgcttgtagaactggaagtgaataactttttcaagcaatatcagtgagtgggtcccatcgacagggttccaggacctggaacactttaacagaaggaaatgccgaagcagcttgcacagttgctttacagacttccaagaggctgattctggcttcaagatggagccttggagttggtttttttttttttttttttcttccctcaaagaacctgcggttgcgctttgtgtgttttgtttttgttttccatttgggggccccatgggaaagagcttctgaactctttcctttatgaactcccactgtgttcctataaaggcccttttctttcttagtgttgtaagttacattttcattatgccccatcacatcttctttactgtaaaaatattaaaaagctgtttccaagtgggacagctaatgaagctctaattattgcagacatatttttgagatgt

SEQ ID NO: 350 - DNA, 2439 bp, Homo sapiens
ctaaaatctcccatggctaaaagagggcaaagcagtcagggatctgacctggcagctattcctccttctctgaagagttcccatcagtagtcattacaactacctctcgcctcaaggctccatttttagctgctgctctgatttcagggcagccagtactctggccccttcattcggggagtggaaggagatgtggggtgggggtgagaaatgcttctgcctgttgttcttgaaggatagactatgggtgggcagagagaactgggggcagaaatggaattagatgtgattgggttatgcagtcaactagaggtctccttcccgccctctctccacacagagaggaacctctgctccttagctcttacagcaggactgtggcatctagtcacttcaatactagttcttgctcttcacagaggtagatttttctttaccctacagcactgttgggcatccctcccatcacatgggtctgtgggtgagatatgttatgctgttcctccctcgggaaggttggtattgaggggtgccttgctccagaggcgccagcccagcatctgtggtgagttggctaagatccagagtgacctgctcagagctccccagaggccttcactctttggggcagtctctctagggtcactttctgaatgtaccttctacctaaagtatacaaacacaaagagccagctgagctggttctagtgtgaaagccgtaagtgccacccagcaggcgttgaaaacaagaaatcattcttctgtggaaggagaatgtgccatctcagctaccctcagtccgccagggagcccagtctgtgtattcatatgaagttgtgaaaaccatgagtgtgtgccatggccatcgtgtctacacacagccactattgttcctgtgggctagtctccagcaaattaaaacactggcatggcctaggaagggcgttgcgagctcctaaatggaaagcttctctgggggtagggagatgaagagccaagatgctggtgaagcaggtgcagtgaggatccaaggcaaggaattgccctgagggaggtggctgcatatggagaaaggcagttctctgtgggcaaggccagcttgcttcaggctgtagagggaatttggtctgaagcaacagggcatgaactgtgactttgagctgccaggttgtcttcatctcagaactttcctatcctggcactctcgttacctttcttctataccttggcctctgtaactgcagtccaaaacaagttacagctgccttaatccactgagattctctatgaggatgtacagaaaagttttcctgtaataattttgcttatatgctaactcttttcatgttagcaaagaatattctatgaattagaatgttactgtggtagatctaaaggagaatgaacagaaggtgctggaggacctgttaaacaatctctggctattaaaaaacatcaagatgagaattaaaggcatatcctgatatacttgcctgcttgcacatgaggctgggagatcccatgcctgttgaagttaactctagccctgacctctattgatcttttgggaatgagggctgatttgaaggtgctgttgcaggatttcatttagctgctgccagttcaagtgacctgtccccagggctgcagctgtatccacctgattgcagtaggtgagggctaacagcagaatttaaagtggaccctgggctgtggagcaaagtgactatccatttggacttttggataatgtggcaggagtcccagctgtttaatttctagtcacattttccagaaagttgttctaagttgagattactgacaagatttctcaagggcaggaccagatatgtgagagacttctagttcagagctgacccctctaagcctctgacacttaaacacgagtcctgctgtccccagcacacaactgcactgaagccttgttcctctcggctggtgtagagctcatctgcatgttgtgtgcagataccagtagcctccctgcttgaacaggcctctcctaggctaggcaggtgttcagaggcatgaaggtctgggcaggggaagggcgtcttctgaaatgggagttaccaggtttttaaatgctgctattgttttatttaccatttaaggtcttttctattatatctgagtaactagtcagtttttcttacagtgctcatagcagttgtatttgaattgtattttcagtgaaatttgttttacattgccatttaaaattggcctttaacagcttcccaactggcttataagatatttttttttaatgaaaacataacccatgaggctcagatgctgttgaagaaataaatggtatgttgctgctgacagtagtgcttgcctattgtaacagcattggttctgctgtagcctcggtgaccatttaagttgaataaatctgtcattttcacccac

SEQ ID NO: 351 - DNA, 908 bp, Homo sapiens
  misc_feature 736,759,772,778: n = a,c,t, or g
ctcgaaggctgagaacaatgttggaacatatacacatacatgcatgtgtagatgtgtataaaattatgaacaaaaaatgagactttgtgatatggttcaaaaattcaaaggacttattaagggtaagttttactggttcttattaagcaaggatgtgtttttgtttcatgtagaaaacactctggtgtacttgctatttttgctttctcagattgcaaaattacgccagcagttgcagagaagtaaacacagcagtcggcatcatcgagataaagaaagacagtctccatttcatggcaaccatgcagctattaaccagtgtcaggtaagagtaccaataccacaaaatccagaaaaggaatttgttgtttttctggtgatttgttatttcattggtaattgtttaggacaaaaatgctcaaaaacatatttgaaacagtgatttaaatactgaatcacagtctttataagaaaacagaatattaagttgacaaaatgatattttcctttagtgacctaagatacgacttctaggagacatagctacttatctattttggtttaccatatttttggctttatcagttcaatattttggaggcagaatgacacagagaattaagcattgggtatggaacaggccctggctgaataacttatcttttctaagtctcagtttcctcatgtgaagatgggaataataatacctgtctcgggcggggaacatcacacaccngggcctgttgtgggctggggcgntgggagagggatngcattngaagaaatacctggtgtaaatgatgagttaatgggtgcagcaaaccaaaacggcacatgggtatgtatgtaacaagcctgcatgttgtgcacatgtaccctagaatttaaagtataatttaaaaaaatgt

SEQ ID NO: 352 - DNA, 1497 bp, Homo sapiens
cgccaccaagatcgcagccactgcttggagggccctgctcgcctccaacaccagctacgcgcttctctggaatctgctggagggaagggtggccctagagacccagcgggacctggaggacaggtaccaggaggtccaggcggcccagaaagcactgaggacggctgtggcagaggtgctgcctgaagcggaaagcgtgttggccaccgtgcagcaagttggcgcagatacagccccgtacctggccttgctggcttccccgggagctctgcctcagaagtcccgggctgaagacctgggcctgaaggcgaaggccctggagaagacagttgcatcatggcagcacatggccactgaggctgcccgaaccctccagactgctgcccaggcgacgctacggcaaacagaacccctcacaaagctgcaccaggaggccagagccgccctgacccaggcttcctcatctgtccaggctgcgacagtgactgtcatgggagccaggactctgctggctgatctggaaggaatgaagctgcagtttccccggcccaaggaccaggcggcattgcagaggaaggcagactccgtcagtgacagactccttgcagacacgagaaagaagaccaagcaggcggagaggatgctgggaaacgcggcccctctttcctccagtgccaagaagaagggcagagaagcagaggtgttggccaaggacagtgccaagcttgccaaggccttgctgagggagcggaaacaggcgcaccgccgtgccagcaggctcaccagccagacgcaagccacgctccaacaggcgtcccagcaggtgctggcgtctgaagcacgcatacaggagctggaggaagctgagcgggtgggtgctgggctgagcgagatggagcagcagatccgggaatcgcgtatctcactggagaaggacatcgagaccttgtcagagctgcttgccaggctggggtcgctggacacccatcaagccccagcccaggccctgaacgagactcagtgggcactagaacgcctgaggctgcagctgggctccccggggtccttgcagaggaaactcagtctgctggagcaggaatcccagcagcaggagctgcagatccagggcttcgagagtgacctcgccgagatccgcgccgacaaacagaacctggaggccattctgcacagcctgcccgagaactgtgccagctggcagtgagggctgcccagatccccggcacacactcccccacctgctgtttacatgacccagggggtgcacaccaccccacaggtgtgcccatacagacattccccggagccggctgctgtgaactcgcccccgtgtggatagtcactccctgccgattctgtctgtggcttcttccctgccagcaggactgagtgtgcgtacccagttcacctggacatgagtgcacactctcacccctgcacatgcataaacgggcacaccccagtgtcaataacatacac

SEQ ID NO: 353 - DNA, 843 bp, Homo sapiens
ggcgtggtgggatgggcctggcttttatgcctagaccaacgtgcggcctgggcaattatctaattatcggttgtctaattgcccagcgtcacacatttctcacctgtaaaatgggtatgacagtctctgccctcccactgcccggggttgctgtacggcctgcgagagcgggtttgggaaagctctttgtcaactgctgtgcggaattgatggggtggccacacttcaatgccttgactcaggggtcagagctttcaagcgaccccaggcagggctatgagggcctccctggcagtggctgcttattccaggctgggcctgccctacggcttgttggcgtcccgcaggcagctgctaggatggtttttgcagggcatttgggccgcagcctggatgcatacctagacctcactgtttttctcagccagggtctgggagagaatgaaacctattgttctagttatctgctgtatgtgactctctcctgtgcgtttctctcttgtgggtcttctctcctgtgcatttagggtggtatgaagtgaagagagaaaatagacacttgtggccgggcgcagtggctcacgcctggaatcccagcactttgggaggccgaggcaggtggatgacgaggtcaggagttcaagaccggcctggccaacatggcgaaaccctgactctactaaaaatacaacaattagctgggcgcaatggcaggtgcctgcaattgcagctattcgggaggctgaggcaggagaatcgcttaaacctgggaggtggaggttgcagtgagctgagatcgcgccattgcactccagcctggacgacagagtaagactctgtctc

SEQ ID NO: 354 - DNA, 2229 bp, Homo sapiens
gtaattttagtcgctggtgatcgcagaattccagctcacagattggtgctctcctctgtctcagactattttgctgccatgtttactaatgatgtcagagaggcaagacaagaagaaataaaaatggaaggtgtagaaccaaattcgttgtggtccttgatccagtatgcttatacaggccgccttgaattaaaagaagataatattgagtgcctgttatctacagcttgccttcttcagctttcacaggttgtagaagcatgctgtaagtttttaatgaaacagcttcatccatccaactgtcttggaattcgttcttttgctgatgcccaaggttgtacagatttgcataaagtggctcacaattatactatggagcatttcatggaagtaatcagaaaccaggaatttgtattattaccagccagcgaaattgcaaagctcttggctagtgatgacatgaacattcctaatgaggagacaatattgaatgcacttcttacttgggtccgtcatgatttggaacagagacggaaagatctaagtaaacttttggcttatattaggctacctcttcttgcaccacagttcctggcagacatggaaaataatgtactttttcgggatgatatagaatgtcagaaactcattatggaagcaatgaagtaccatttattaccagagagacgacccatgttacaaagtcctcggacaaaacctaggaagtcaactgttggtacattatttgcagttgggggaatggattcaacaaaaggtgtggctgtactggaaggtcccatgtatgccgtaggaggacatgatggctggagctatctgaacacagtggaaagatgggaccctcaggctcgccagtggaattttgttgccactatgtctacccctaggagtacagtaggtgtggcagtactaagtggaaaactttatgcagttggtggtcgtgatggaagttcttgtctcaaatcagtagaatgttttgatcctcatactaataagtggacactgtgtgcacagatgtcaaaaaggagaggtggcgtaggagtgacgacctggaatggactgctgtatgctataggggggcacgatgctcccgcatccaacttgacttccagactctcagactgtgtggaaagatatgatcccaaaacagacatgtggactgcagtagcatccatgagcatcagcagagatgcagtgggggtctgtttacttggtgataagttatatgctgttggggggtatgatggacaggcataccttaatactgtggaggcttatgatccccagacaaatgagtggacccaggttgctccactgtgcctaggaagagctggagcttgtgttgtgactgtaaaattataatttagtgccccgttttctacatgaagacaccgtcttcctttattaatttagtataattattctatcaatggatacatttttagtaaatgtgcattgtcacaatcctgggcacaaagtgcctgatgtcaaaatgaagatagtaaaataagggaggaagcagtggatggaccaggattaattcctttcatttcttagtaaattaaaacctgcagctggtggattgtgatcacacattcccgaagtaataagtgaggacgaatgcactgctctggaacataacccagtgctaactgggggtttcatttattcagtcaagcacatcttactcacatccagatttattttcctacagtgcaaacacaccagatgaaactttaaaatgttactttttgtaagcttatcataaatgagttgcagtaatttgtttgcttgtttgtttaaccacaaccactattttaatgatatactaaagataacactatttagttttttcagaaacatctgcattatatgtgtgttggttgtggattttgtttctaaaattggcttagtccaataaataaagaaaagcattaaggacttaaagcaacaataaccaaataaaaacttgataggatctttgaagtctatttaaatattcattccattacatctagactcaccaagaactacatgttatgatgttaagttgaagttgaaacatgatgttttgcattaaatttaagatatgcaaatttatgtagagaaaataaatgttatataccctataatctttcacctaattagtatttaattatatggatttgttttatattataaaagatgttttgattttgtcttttgatattg

SEQ ID NO: 355 - DNA, 1859 bp, Homo sapiens
cttaatgctttcctcatcagttcttaagagaaaaggcctcatgatctatgtttacaacatagtgtggaatagagtaattcttgagaaggataagtgagtcaagtgaattggagttcctaggccttcacgcagaattttgcaagacagtaattacacttgtgattcttactatcccttgctgttctttcttaggttgatgttgaacagcacactttagccaagtatttgatggagctgactctcatcgactatgatatggtgcattatcatccttctaaggtagcagcagctgcttcctgcttgtctcagaaggttctaggacaaggaaaatggaacttaaagcagcagtattacacaggatacacagagaatgaagtattggaagtcatgcagcacatggccaagaatgtggtgaaagtaaatgaaaacttaactaaattcatcgtaagtactactgttttcttaagctgtggaaagctttaggttctgggctttgtgtgtatgttgggcgggggggggcggtgtgtgccgtcatgtaaatatattaataacgtgggagttttagcacaaatcctttatcctttatatttttctggtacagtatggtatggagcatactgataaaccctgaaagcaagctttatttgaaacaaggtcgataggctagccatgtccaggcccagatcccagtcaaccagtcggttactcaatgtattgaattactctgtgcttatactagcatcctggggagggcactttgcaagcagggaaggctggtctgcatgtgattgggaagagagagggcccacttcaaatggcggtgtattatattgcgtattcaggtgatgttactcagagcctttgtccagggtcttttgaggcaatgatggaaaaacgcctaattagcaagcatggttaagagggaagaggcccattcagggggcatcctgagggcatggtgtctatctctgcatggcccacctatgaggaggagccaaaggagacttagtgctgtcctgtgcttgtgtgacaccaaacatcagagctcaccaagtgtgtggtggcaaagagcaaggtatttgaacctcagaagagtctcaagtgtcctcacaacatgatttgcttcatggaagtgtaatatgtgttcagtcctgagaggactgtctgggatttgttaagcactagttgccaccctcttttattgtcttttattgtcttttaattgttcctattgctgccaggcctggtgaacctgttatgtcctgatggcacttaggtgtcgtaaacacagctccccctcccatccctctggtagcctacaagaggaagcctgctacttggaccttgaaatcatttgttcctatcacctgtgctaccagctgtgttttattcattaatggggatggaaggaaatggtcaggcacatgttatgagcccagagctttcactggcttcagcgattgggcatcatcaatgtgatcatgattgtagccgtggacctttgataattgtgagttagactaggaataaggtatcattgggggttcctgacatgtgcttaatcacaaatgacttctgcaggccatcaagaataagtatgcaagcagcaaactcctgaagatcagcatgatccctcagctgaactcaaaagccgtcaaagaccttgcctccccactgataggaaggtcctaggctgccgtggcccctggggatgtgtgcttcattgtgccctttttcttattggtttagaactcttgattttgtacatagtcctctggtctatctcatgaaacctcttctcagaccagttttctaaacatatattgaggaaaaataaagcgattggtttttcttaaggt

SEQ ID NO: 356 - DNA, 1088 bp, Homo sapiens
agccgggtgccatagtgaggaccctcgtcctccagactggctggcaggagtcaggccccagcagccctcctgcccccaaagctttccgagtctggtgggcaggacttctcgctgcccttccaagcccggctttgggccaggaaaggcttccccaggtggctcttctaccaggcttttcctttgatgccgcctggatttccgcacctgcctgtctcctctcccagagcacagtatttgggagactttgactatttattcagactcctggctatgtattgcacattggcaagtgctctggggatgaggcatgggtataggaagggagaaaggagttggagacaagatcctcttcattttccaagatcaaagtcagcctcttctccccatgcttctaggaactgcctggttttcgagcaggtcctggctgagcgggctctgagttctgtactggaattgagtgtaaagatgggaagagaactgggctgactccaggacctccaggatgaggcagaggcatgatgcttcctgctcacctgggccaccctctctccaggacttgtcagctggtggttcagccccttctccaaccccttcataagcttgggccactgcctgggacccagcagacactgcccaggactctttagtgcactcactcttgtctgccccctaccttccctcctggaaccacactacttgaatcaccattactttgcctcgctggcagagttgggtcaagtgccctctccttgaccttgagatgaaggtcaagagcacagggaccaggccttggttaggctgagctcccagcaggacaccgcctgcagaaaggacctgccctgataatgtcccttccccagattctcaagcagatgcccaagggaggtccccacagagccagagtgcctgaggcttcctgcttgagaacctgccccctggatcttggacacttacagattgagctgtatgaattcagcgggtctcactccagagggtcagaacgtttgctttagttttttcatctgttttgttccttgagtcagtgctgttgatgacgagttgtcttgaataaatcatgtgttctttgc

SEQ ID NO: 357 - DNA, 512 bp, Homo sapiens
cattttctagggagaacaatgagaatctcaatgccagtagtactggataatagtgcgtattgcttctggtggcattaccctgatgatgggctgaagttcatttattagggtggttcctgatgggaaaaggacatggattaggactttaaaacactggacagaatttcccacagtctttgccctcaaggagttcaccagtttatggggctagaagagcgagaaaattcaagaaaataaatgtagctggtgggagactttgtagatgttgggctatatgttggggtgatggtagctcctgatgtaattttcttagttgcatcttcaatatgcctggagtcgtctgtccaaggcttgtccaggcttctgggtttctctcaagtttgtttttctcaggatattgtcctggcccagctactcctttacctgtgagaagatcttcaccattaggaagatctctagacccccagatctctggtttctcttcataacgaataaatctttcgccttttact

SEQ ID NO: 358 - DNA, 2488 bp, Homo sapiens
cactgctactggctcttggtccctccgttggactgtcctgcggagagaaaccccagcccatcggtctgcgctgggaccgcccgccgcgcatctgcccttcttcgctgactccgccccgcatctggccagacccgcctcgcgtcagagctgacccactcactgcgcgtttgccagtcagtctctccggacctgcctcgagcctcaggctgctgaaatcaccgcgcctcactcgcctcgacagtgattctgagtctgcttttagcttccttttgcctgccttggctttttctgttcgtgaacagctgtttggcccatagcttagagaaagcagccttttttctcttcaaagagaacctcctcccagtgctcagagagatggggagcggggagcctaatcctgctggcaagaaaaagaagtatctcaaggccgctctgtacgtgggtgacttggacccagatgtcaccgaggacatgctctataagaagttcaggcctgctggccctctgcgattcacccgaatctgccgtgatccggtgacccgcagccccctgggctatgggtatgttaacttccgctttcccgcggatgcagagtgggccttgaacaccatgaattttgatttgattaatggaaaaccattccgccttatgtggtctcagccagatgaccgcttaagaaagtctggagtgggaaatatattcatcaaaaacctggacaaatccatagacaatagggccctgttttacttatttctgcttttgggaacattctgtcctgcaaagtcgtatgcgatgacaacggctctaaggttatgcctatgttcactttgacagcctggccgctgccaatagagccatctggcacatgaatggagtgcggctcaacaaccgccaggtgtatgttggcagattcaaattcccagaagagcgggcggctgaggtcagaaccagggatagagcaactttcaccaatgttttcgttaaaaacattggagacgacatagatgacgaaaaactgaaggaacttttctgtgaatatgggccaactgagagtgttaaagtaataagagatgccagtgggaaatctaaaggctttggatttgtgagatatgagacacacgaggctgcccaaaaggctgtgctagacttgcatggaaagtccatcgatggaaaagtcctctatgtagggcgagcacagaagaaaattgaacgcctggctgagttgaggcggagatttgaacggctgaggttaaaagaaaaaagtcggcccccaggggtgcctatctatattaagaacttggatgagacaatcaatgatgaaaaactgaaggaggaattttcttcctttgggtcaattagtcgggccaaagtgatgatggaagtggggcaaggcaaaggatttggtgtggtctgcttttcctcttttgaagaggctaccaaccagtgatgagatgaatggccgcatagtgggctccaagcccctgcatgtcaccttgggccaggccaggcgcagggctgagaataagaatgctcagtttgttcagccttagtgggcctccttagtttgggctcctttgtgataaggggttattttatgctaattcacaagtttttttttgaagtgaattcttttgaaaaaaaaatgcaaaactagaaaactttattcattttagaatagaacataatttctaactgtaaaattgtcattttgactttttttgatgtaatatccttagaaatctgtagaataaagtgtattcctccacttttttttcctgaacagtcaaggtgaggcaattgattgagtatatttcccttcttatttcagtaatactctattttttttcatgaaaatgtcaacatggttcttctgaatctatcacagtgaaaagttctaacttgtttttgagaagtcagtacagcaggggaaaacatatgtgatgcaattaacatctgcataatttcacttaaaattattatgcaaaaatgaatgttttttcaaaaaatgtgaaatgtattttattttctttatttgtattcttgtttcattttttaatatgttgtgaacatgctacagatttgatagtacttttgactaaatgttgggagtggtcgtattaacttcttgcccaaagaagtaagcatattggtgttttctcaattagtcactgagaaaattaacactttaggcagtggctatttaaagtaggaattgcatcttaaaaacctttcctaagagatttggtatgtgaggatactttcagtaccactcctaccattcatttttctaaattccttagtacatatacttggatcatgttaaattaacaagaaagatgaataactgcgctgaattgcctttacctataaataatttaatattttacttcgggttttatcaactgtcaatataaaagacagtactccacagaatgatgttgaaaaacttcttcgaagaacaccttctattaaacttgttatctcttgt

SEQ ID NO: 359 - DNA, 1608 bp, Homo sapiens
cgacaaaggtgacctggggcctcgaggggagcgggggcagcatggccccaaaggagagaagggctacccggggattccaccagaacttcagattgcattcatggcttctctggcaacccacttcagcaatcagaacagtgggattatcttcagcagtgttgagaccaacattggaaacttctttgatgtcatgactggtagatttggggccccagtatcaggtgtgtatttcttcaccttcagcatgatgaagcatgaggatgttgaggaagtgtatgtgtaccttatgcacaatggcaacacagtcttcagcatgtacagctatgaaatgaagggcaaatcagatacatccagcaatcatgctgtgctgaagctagccaaaggggatgaggtttggctgcgaatgggcaatggcgctctccatggggaccaccaacgcttctccacctttgcaggattcctgctctttgaaactaagtaaatatatgactagaatagctccactttggggaagacttgtagctgagctgatttgttacgatctgaggaacattaaagttgagggttttacattgctgtattcaaaaaattattggttgcaatgttgttcacgctacaggtacaccaataatgttggacaattcaggggctcagaagaatcaaccacaaaatagtcttctcagatgaccttgactaatatactcagcatctttatcactctttccttggcacctaaaagataattctcctctgacgcaggttggaaatatttttttctatcacagaagtcatttgcaaagaattttgactgctctgcttttaatttaataccagttttcaggaacccctgaagttttaagttcattattctttataacatttgagagaatcagatgtagtgatatgacagggctggggcaagaacaggggcactagctgccttattagctaatttagtgccctccgtgttcagcttagcctttgaccctttccttttgatccacaaaatacattaaaactctgaattcacatacaatgctattttaaagtcaatagattttagctataaagtgcttgaccagtaatgtggttgtaattttgtgtatgttcccccacatcgcccccaacttcggatgtgcggtcaggaggttgaggttcactattaacaaatgtcataaatatctcatagaggtacagtgccaatagatattcaaatgttgcatgttgaccagagggattttatatctgaagaacatacactattaataaataccttagagaaagattttgacctggctttagataaaactgtggcaagaaaaatgtaatgagcaatatatggaaataaacacacctttgttaaagatactttctaaacttgtgtttaataaactttaatagtcatagaattgtaaatcactatggttaacagaaagtgaaaatattttcatgcagatgatgtgaacagccatgtgaataggtgacttgggcacacagcagggtcatatgacttcagaaaacttcgcttttcagttattccattgttataatgtcaaccctttaagacattgatgtttagagggctcacaaataaaatctgaatacctg

SEQ ID NO: 360 - DNA, 560 bp, Homo sapiens
gtgaaaagggggtccctggcacaccccaccacccactgcttcggcggatgagatgaccgtgctcagctcagggagagaccccgcccttggtcccttctctcacccagagtaaggctcttcctggaagggactgggggttaaaggccactgtgtcgcagccccccagtccctacttcaggctgagccatcttgtggtgctgggcttcctgcccaccagccgtgccatctctgcccaacccggctgctcctctgccccgaagccctcgcgaggccctcctggaggcccccgtgctggtggagtttgggggccagggggacaagttgccttctctctctgccctggtcctccctgctgtctggatggtgctgccctcctctgccccatgcctttggggtctgttcgtccgtcttttttgttgttgtttttatatattgaagcgcctggcccagcccccagcccccagcccgcactgcggttaatttatgtgttgtttaaaatgcggctgctctgcttcctgcctctgcttctgccgtatccctaataaaatgtggaggccccc

SEQ ID NO: 361 - DNA, 2017 bp, Homo sapiens
gactcatgccctttccttggccttcctttgagtggagggaaggaggctctgagtagcttgtacaagcttgttatccgacgtaggtccaaaaaccctttcagttactttggtgatgcagtctttccccataattagccaagaggctttccacaatgaggattacatttacaaaacgatctgcttttaacagatgcctgaaatcatccctgtggcaggcacccacttcagatttttttttttaagttgttattgtactttaatcaaattcatatactttagattacttaaattggtattttgcttcaaattataatttttgcttctaagataatctgttattcaaattatcttagatagggtataaagttttaccctcacatgattttaatagaatttcatgaccaggtgaaacctaccattgtccccaaaccctgtccctgcagggctgaggcccatgatgaaggtgctccaggcctagcctaggagtcggaaggactgtgtcttccttcttttgcctcttgattaacgtgtgttgggctgctgggaagctgggaatccaatttgggtactttccaaacatatttggaaacgtgcttgtattacatgtgacattttttcttaaaacattttactccttagcctctcaggacaggatttggggttgttttcacttgttgaaagtcttctatttattgcttatctgaagtaggctgtagctaacatttgactcatgaaaatgaagtaagcattcaaaatgtttttttcctcaaagctaacaggccaactcggaatagggatatcgtaatattaaagtagaaaggcttttcttttgtggcaaagctgtaggcaactttgagaagtactggatttagaataaaatttctatcctctgtttgtaacagagttagggctaaagtttgtgggtttctatcatctgtcagaggaatgttgttttaattgggaaagtgttttatttgagatgtcattcccctgacagagcagaatgactcatggctctctaaatggtagcaatttctagcactatagctggatttaggcccccattctgttacttaaactatagaatacaaaactattcagacctctccagcaccaccaaaaaccctttactttgtttcctgatgcaggtttgagtatcttttcaattttgacaacacctttgagatccatgatgacatagaagtactaaagcggatgggaatgtcgtttggcctggagtcaggcaaatgctctctggaggatctgaaacttgcgaaatccctggtgccaaaggctttagaaggttatatcacaggtatgttaactgatgctttcatgtgttgtccctgattaaatgttgaatccaaacttgttaaaacctttcttatagaaaattgcaaaattttagaacatctgtgcttgtgtcgacaaactgaaacctttaacactttaggaccattttttcaaaaattagattaaatagattgtttcataacattatgaacttacatctatacaccacacattatatactattacatctaaattggctcactcagcactgaatttggctcttcagagagatcttgtaattcccagtacctagcttagagcctagttagagtaagctagtaaaagctcaatgagggagttttaaaaaatcttctcttagtgccctgtggatacttcaagggaaactttgggcaatttacaaaagaaagtaggtacatcctggccgggcgctgcagctcacacctgtaatcccagcactttgggaagccaagacgggtggatcacctgaggtcgggagttcgagaccagcctggccaacatggtgaaaccctgtctctactaaaaaaatacaaaaaattagccgggcgtgatggcacatatctgtaatcccagctactcaggaggctgaggcaggagaatcacttgaacctgggaggtggaggttgcaatgagctgagatcgccattgcactctagcctgggcaagaagagtgaaactctgtctc

SEQ ID NO: 362 - DNA, 810 bp, Homo sapiens
tgcttaggaagagaaggtcagagttcgcgggggcagaggcattcttgccgctggcccagtcactatgtagtggaggggcagacaccctcccgcaaattctggaaggttcttagtctcgactagggcagtagccccaggactcctagtcgccggcttcaggtcactgccggctgaacggagctgccgtcgccatgtttggctgcttggtggcggggaggctggtgcaaacagcagcacagcaagtggcagaggataaatttgtttttgacttacctgattattgaaagtatcaaccatgttgtggtttttatgctgggaacaatcccatttcctgagggaatgggaggatctgtctacttttcttatcctgattcaaatggaatgccagtatggcaactcctaggatttgtcacgaatgggaagccaagtgccatcttcaaaatttcaggtcttaaatctggagaaggaagccaacatccttttggagccatgaatattgtccgaactccatctgttgctcagattggaatttcagtggaattattagacagtatggctcagcagactcctgtaggtaatgctgctgtatcctcagttgactcattcactcagttcacacaaaagatgttggacaatttctacaattttgcttcatcatttgctgtctctcaggcccagatgacaccaagcccatctgaaatgttcattccggcaaatgtggttctgaaatggtatgaaaactttcaaagacgactagcacagaaccctctcttttggaaaacataatttgaataaaataatttttaatgg

SEQ ID NO: 363 - DNA, 2213 bp, Homo sapiens
gcggagggccgggccggagcggggtgggtaggggacgcgaggcggagcggggccccacacaggccgcggcggctggctcgggcccctacggtcccggcggcggctggaggaggaagccaggcggctggcggaggaggagagacggaggaggccgagaccggagcgccgctcgccgcagacttacttcccggctcagcagggaaaggttcctagaaggtgagcgcggacggtatgcaaagttgtgaatccagtggtgacagtgcggatgaccctctcagtcgcggcctacggagaaggggacagcctcgtgtggtggtgatcggcgccggcttggctggcctggctgcagccaaagcacttcttgagcagggtttcacggatgtcactgtgcttgaggcttccaccacatcggaggccgtgtgcagagtgtgaaacttggacacgccacctttgagctgggagccacctggatccatggctcccatgggaaccctatctatcatctagcagaagccaacggcctcctggaagagacaaccgatggggaacgcagcgtgggccgcatcagcctctattccaagaatggcgtggcctgctaccttaccaaccacggccgcaggatccccaaggacgtggttgaggaattcagcgatttatacaacgaggtctataacttgacccaggagttcttccggcacgataaaccagtcaatgctgaaagtcaaaatagcgtgggggtgttcacccgagaggaggtgcgtaaccgcatcaggaatgaccctgacgacccagaggctaccaagcgcctgaagctcgccatgatccagcagtacctgaaggtggagagctgtgagagcagctcacacagcatggacgaggtgtccctgagcgccttcggggagtggaccgagatccccggcgctcaccacatcatcccctcgggcttcatgcgggttgtggagctgctggcggagggcatccctgcccacgtcatccagctagggaaacctgtccgctgcattcactgggaccaggcctcagcccgccccagaggccctgagattgagccccggggtgagggcgaccacaatcacgacactggggaagggtggccagggtggagaggagccccgggggggcaggtgggatgaggatgagcagtggtcggtggtggtggagtgcgaggactgtgagctgatcccggcggaccatgtgattgtgaccgtgtcgctaggtgtgctaaagaggcagtacaccagtttcttccggccaggcctgcccacagagaaggtggctgccatccaccgcctgggcattggcaccaccgacaagatctttctggaattcgaggagcccttctggggccctgagtgcaacagcctacagtttgtgtgggaggacgaagcggagagccacaccctcacctacccacctgagctctggtaccgcaagatctgcggctttgatgtcctctacccgcctgagcgctacggccatgtgctgagcggctggatctgcggggaggaggccctcgtcatggagaagtgtgatgacgaggcagtggccgagatctgcacggagatgctgcgtcagttcacagggaaccccaacattccaaaacctcggcgaatcttgcgctcggcctggggcagcaacccttacttccgcggctcctattcatacacgcaggtgggctccagcggggcggatgtggagaagctggccaagcccctgccgtacacggagagctcaaagacagcgcccatgcaggtgctgttttccggtgaggccacccaccgcaagtactattccaccacccacggtgctctgctgtccggccagcgtgaggctgcccgcctcattgagatgtaccgagacctcttccagcaggggacctgagggctgtcctcgctgctgagaagagccactaactcgtgacctccagcctgccccttgctgccgtgtgctcctgccttcctgatcctctgtagaaaggatttttatcttctgtagagctagccgccctgactgccttcagacctggccctgtagcttttctttttctccaggctgggccgtgagcaggtgggccgttgagttacctctgtgctggatcccgtgcccccacttgcctaccctctgtcctgccttgttattgtaagtgccttcaatactttgcattttgggataataaaaaaggctccctcccctgc

SEQ ID NO: 364 - DNA, 522 bp, Homo sapiens
gacagactatcagaggttccaaaggtcctccagggggcctcggtctgacactgtcttctctcaccatgctcagttttttctgaacccagagctctgagagccgagtgtgaagaaagctccagacttggccagaactccaaccatgtggaatctgagggcctggccttctagagcaggttctagaaggtggatgtgttctatggtataaagcatcccctttctggccaaactagctcttggaggaacgagcaaaacagaagcggtgcatacctcagagcctggataaatcacatactattgaacctggaactggctttgaccatgaaactgtgaatggccctaacttcaagggaaatgagaaatcgaaggaattggcccaatggcgaggagaggaaaggccaagggaagagaaaagtctgcgttagtctggagaagttggactagtgaggtaatggatgtcatcaatctcaggaatgctattacccagagcctctgagctactactttgcatctgtactgaat

SEQ ID NO: 365 - DNA, 2610 bp, Homo sapiens
gccactgaaagcaaatgtctctccttaagcgatttatttacctattcacagtcattgctattgagcagaacagagaccgtagcatggctaatccatacttggcgctagcctcgaagtgtccagccagcagtgtggacctgcagggcacaatgtcactggggagctcactcacctcagcattggccgcaccccttaaaccagccaccagggcctctgaagactgcattgcgtggacctctcagcttggccttcaggttgaaggctgacggctgaggaaaaggctttgtggaattttctaaaggcagaggttcaggccccaccccgggcctcggaattttccaaatgcagaggctcaggccccaccctgggcctcccgcttccctccagggctgacatctgccctctcagtcagcaaaacctccctccagctctgctgtgccagggtaggagccagggatctggggctcccctcgggagggttgcatctggaccactgcaagcactgccctcacctccagtgccggccccagggccttgtccaggggtcgaaggagtgtgtgtcacccccaagacctgctgccaagtgtctcagagcctcctggctgtgtcctttctctggccctcaaggtcccttttcccatctccctcccccgaccaggaggccacctcacacaccacggctgtgacacttccctgtgcccttccctcagggcctggggccatcctactagtgcaggagagggatcctcttcccccaggccgtcctggcgggtcctgcctaggtccggggtgccggcccttggggagcgcagtgctcccgtccccgccctgtctccacactcaacctcgccaggtgttcagagcctctgtcccagccagcatgaggctggcatggttctgcctggtttaactctttgttcgggtgcagttggcacatccacacagtggctcatggccgcccttgcccagctctccaggcctggccgccggctgccccccccccaccctgttgctgtctcgtgcagcccctgcacgggagctccagcttgtgtcagcgggaagggctatttcaccataagcaacactcacactcacacggggcttggttcctgtcccccgttcaccattctcagatcccccagctggccgcctgccccctgcagagcctgaggttgtccaagccacggagccccggacgctgctgcgcctggtgtggttgtctcaacttgtgagcccttcaagtggctcccaagtcctcgcaggtggcccggggcgtgcctgaaactgtgctgtactcaggctctgtgttaatggctccagacctgcaaacggtgtttggccaggatcacagggcccttggtggcagcaggtctgtttttaagctgaaaccctgtacttctgttcgcggccgtgtagagctgccccttatgccacagcttcctcatccatacgtaggggtgatgttggcaaggcctccggggcgctcaggatcaaaggcggcggcagtgtcctgccaagtgttcacagctgatgagacgtggtccctgaacacagcggttcctgttctgatcactcgagtctccgtgatgccaccgttcccagaaggcagcccgtgcagcctccgggtccccccttcagccatggcagcccgtgcagcctccgggtcgtcccttcggccaagcttccctttccttgagagcagcacgctggcctggccatgcagaacaaaacacaactcagaaatccctcctcagccctcggcagtaaaacttctgaggattcgactttttagttaatttgctcactgtggcagctcactggaaaataaatcgaggatgccaagtcctcctcttagaaaaatagcccctgcagtggggtttgctgatgtgctcatttgtgtcattgcaggctttatcctgtggataaacgcagagtgaacgagtttggggagtcctacgaggagaaggccacgcgggcgccccacacggactgaaggccgcccgggctgccgccagccaagtgcaacttgaattgtcaatgagtatttttggaagcatttggaggaattcctagacattgcgttttctgtgttgccaaaatcccttcggacatttctcagacatctcccaagttcccatcacgtcagatttggagctggtagcgcttacgatgcccccacgtgtgaacatctgtcttggtcacagagctgggtgctgccggtcaccttgagctgtggtggctcccggcacacgagtgtccggggttcggccatgtcctcacgcgggcaggggtgggagccctcacaggcaagggggctgttggatttccatttcaggtggttttctaagtgctccttatgtgaatttcaaacacgtatggaattcattccgcatggactctgggatcaaaggctctttcctcttttgtttgagagttggttgttttaaagcttaatgtatgtttctattttaaaataaatttttctggctgtgagcatttttcttgacctggtataatgaaagtatttcagatatttgagtttaacccttttccagaaagtaatacatgatatggatttatttatgcattaaaagagcaaatttaaagagc

SEQ ID NO: 366 - DNA, 744 bp, Homo sapiens
gggctcctttctacctccagtgccctgagcctccagtccgtctccccctgcatgccccatgtgggaggtgctgagctccaaaccagcatcacaccaactctgacacatggatgtacctatcttggtgatgggtgggggccaagaattgagcatgacatcttccccagcagccacctcctctgagatccctcaccttctccaaaccagatccaatcaaacctcagcccgaggaaacatgctccccaacgtgctctcctgtgcttctgttttgtccccctgctggggggacaggagagggagtggtgaggccctgggcctccagagcctggctctgctttgtgctgtggcttagccggaggggacgtggccaagggtgaggtggccaaaaccagaaccagcagtctcctgccttgttccctccctggccctcaggccctccttccagggatgtctctccagctctactttatgtcctgaagctgacccgaggtcttcctatctggaatgactagagggagccaagaggatggggtgggggccagggccccccagggcctatcgtgggagagcctgggcaggatcccatcagaaaggtgctgactaaactggttgcccggacactcaacagcctccacctccctttctaccctcacagctcctggggccttcctggctctggcccagaaagtgattcatttgtaaattatcatggttttctttctgcattaaaatgctcatttccgg

SEQ ID NO: 367 - DNA, 1351 bp, Homo sapiens
cttggagattatctccacccctcacattttacagatggggaaataaaggcccagagaagtggacacggatttgctctgcaatcttgggcaagtactgtacctccttagaccttcgtttcctcatctttaaaatgaggataacacgtgtcatgggtcagttttgaggactgaagataatgtaggtaaaacattattagaacagtgcttgagtgagtcagctctcaacaaacgttagctgtgattattgttattactattattacttttgctaccatctaagagctccagctgatttatggcagagccatgtctgatgtctgacagtccagtgtccatcccgtcaggaaccctcttcaacacaggtgtgtgtgcatttctttctgtaagtgtgtgtgcacatctgtatgcccacacacatccacgcttttagcaagcagaactgcctggtatggagtagactgcatggatctatggttagaacatgtgagttggatggctgcatgtatccatgtgtttgtgtcttctgtgaacttctgtgccatcatgtgtaccagaggtgtatctgtcagtttgtccctctgcacacatctgtgggtacctctatgaccatggaactgtgtgtgtgtgtgtgtgtgtgtgtgtgagagagagagatacatgtgctctccgtatgtgtgtgtaaagaagcagtgacttagaaatagagtcaagtaaggtttggggacaggagggagggcttgggagcctgatactggagagtccagagttgagggtactgggggcccaggtcatccctccccggcacccctgactctcagcctctttctgccaccagcgccgggtttatttccgcctctggaatgcagcactggggggattcctggcagtgccggaccatgtggaggacatgaaagcaggccgtgtggtggtcgccgacccccaagctggaggtagctgcatctggtactacgaggatgggctgctgaagaaccagatggcccccaccatgagcctacaggtgattggaccccctagcccaggctccaaggtggtgctgtgggccgagagccgcctgccgcgccagacgtggagcatcagtgaatcgggccacatctgcagccagatgttcgaaggccagatcctggacgtgaagggaggccggggctacgaccgggaccacgtggtgctatgggagccggatgaggacagggcatcccagatctggactatccacgtgctttgaaacttttcccctcaccctccagccctggaggcttttgctgggatgaatgtttttatagggtttttgttgtaacataagctattttctaatatgctgccaggtaccctt

SEQ ID NO: 368 - DNA, 1045 bp, Homo sapiens
gcaggaccgcctgagccaggtgctgcgagacctcgaggacgagagtacgcccattgtgaaactgggggatgccagcatcgcagcacccttcacctccaagctctcatccatccagtgcatctgccacgtgatcaagcagggccgctgcacgctggtgaccacgctacagatgttcaagatcctggcgctcaatgccctcatcctggcctacagccagagcgtcctctacctggagggagtcaagttcagtgacttccaggccaccctacaggggctgctgctggccggctgcttcctcttcatctcccgttccaagcccctcaagaccctctcccgagaacggcccctgcccaacatcttcaacctgtacaccatcctcaccgtcatgctccagttctttgtgcacttcctgagccttgtctacctgtaccgtgaggcccaggcccggagccccgagaagcaggagcagttcgtggacttgtacaaggagtttgagccaagcctggtcaacagcaccgtctacatcatggccatggccatgcagatggccaccttcgccatcaattacaaaggcccgcccttcatggagagcctgcccgagaacaagcccctggtgtggagtctggcagtttcactcctggccatcattggcctgctcctcggctcctcgcccgacttcaacagccagtttggcctcgtggacatccctgtggagttcaagctggtcattgcccaggtcctgctcctggacttctgcctggcgctcctggccgaccgcgtcctgcagttcttcctggggaccccgaagctgaaagtgccttcctgagatggcagtgctggtacccactgcccaccctggctgccgctgggcgggaaccccaacagggccccgggagggaaccctgcccccaaccccccacagcaaggctgtacagtctcgcccttggaagactgagctgggacccccacagccatccgctggcttggccagcagaaccagccccaagccagcacctttggtaaataaagcagcatctgagatttt

SEQ ID NO: 369 - DNA, 1781 bp, Homo sapiens
caacaacccctccctctgatcatttccagttgattgtcatatccaggaaaaaatggaacagtgcactcttctccctgttgacccatgtccacctattggttccccaaaatccacattctccctgggcccagatgactttgtctccctgggcccagattctttgtctctcttcaaccttcatctcaaattgtctctaagcactaccttccccagagcttgccaggttgggttttgagattagggtcaggtcatgggtatgtggagaatggtttggaggttgaggacaaccacaggtgtctcattgctgccatttctcctgaggacataatcacttggtcaccttggaccctgtcacttcctaaaattactcgttctgtcatgccatagaggtcagttttcctctttcttggcttctacccacaaacattcaccaatcatttattcgttcatttagcaaatatgcagcctccgcaagatgagctctcctgcagacaagcatggtctgaaacattctttgagcaatatttattgagtgcctactatgtgttaggtactgtgccaggcactgataagccagtggtaagggaaacacagctctaacctcacctcattctccaggttacaaaggccatgtgcccctttgaatctggcagagaaagtttcctcgttgtaagtatttgcatctacttcaagccagattcttctgcctctttctcctttccagacccctactctgtgcagtgctgaccacagctagagccaccgccccattgctcaaccagtatttatttccctaaacgacccttcctcacattcccttcctccacctctccttaccaagcacccaaaagaggatttagaactagcagggtggacatcatctggttgtttctacttttctctgcctagcacaaaattggagaaaactggagcctccatccgcagtcacacgtgtacagatctggggatttggatgtaggcttttttctaacttctctctcagaagcttctacagaaacccttccatctgtagcctcaagggccacctccaagggaaggcttaggcaatgatcctgtttctaccaacactgcaccttatcccaggaacctgccctagacctccagagaccatattttctctccctccatttctacccagacctccaggcctccttctggaatcatagaaccgtagaattggaaggaattttagaggttttctagttggagttgtgtccaacagaattcattaacaccagcctgggcttgtttttcctcctccctctggacttttttcatcttttcctccacctcaaaaaatacttacacacagattcttcttgtacaggcatcaaaaccaactcctctgcccctaaggctgtgtccctgtggtctccagccacccctaccccagtcactcgccccttcctcatctctggaatttggccaggcagtcccagaagactctggagtgacctcctttgcctaaaaagcagacagataggcatgccccaggccctgagtgagcagaggaggactgtagggtgagagggaaagaaaatgaaggtgactttcatggaagtttcatttcttttccccgattgtaccaactgcatgtacttttggcctggctgcaaggagcaatattggtttactctcgtatccttaaaaagttacagaactgtgtcttaagagaattatttatagttactataactgaattgacaaatgtcaacttaactgataaattatatttggtaaaataaagaggacgtttattt

SEQ ID NO: 370 - DNA, 404 bp, Homo sapiens
aaataaataaataagtaaaaataaagaaagaaaaagacaagcagccagcgcctctgaatactatttccgcatctgcatttgccacctacaagtgctaggtgcctacatttggtagcacagaagattagatattgaaggagcatcttagcaatttttgagtacctcagagtttaaagagaggattttaaccctgaaggtttacactttatgtcagggaaagatgaacttatttttcagatatcatcagacctgtgcccttggccaacaatgatcacatttgtctggcacagtattttccccaatctgaacacagcctgttacaatttgatagaattgttgaaatggggagtttcatgaccaaatgaatgttaagttaaagttaaaaggacttcatggtattctcc

SEQ ID NO: 371 - DNA, 1219 bp, Homo sapiens
ccacgctgtaccgccgcaccgaggatgactcactggttgtgtggaaggaagtcgatttgacccggctgtctgagaaggaacgtcgtgatgccttgaatgagatagttattctggcactgctgcagcacgacaacattattgcctactacaatcacttcatggacaataccacgctgctgattgagctggaatattgtaatggagggaacctgtatgacaaaatccttcgtcagaaggacaagttgtttgaggaagagatggtggtgtggtacctatttcagattgtttcagcagtgagctgcatccataaagctggaatccttcatagagatataaagacattaaatatttttctgaccaaggcaaacctgataaaacttggagattatggcctagcaaagaaacttaattctgagtattccatggctgagacgcttgtgggaaccccatattacatgtctccagagctctgtcaaggagtaaagtacaatttcaagtctgatatctgggcagttggctgcgtcatttttgaactgcttaccttaaagaggacgtttgatgctacaaacccacttaacctgtgtgtgaagatcgtgcaaggaattcgggccatggaagttgactctagccagtactctttggaattgatccaaatggttcattcgtgccttgaccaggatcctgagcagagacctactgcagatgaacttctagatcgccctcttctcaggaaacgcaggagagagatggaggaaaaagtcactctgcttaatgcacctacaaagagaccaaggtcaagcactgtgactgaagcacccattgctgtagtaacatcacgaaccagtgaagtctatgtttggggtggtggaaaatccaccccccagaaactggatgttatcaagagtggctgtagtgcccggcaggtctgtgcagggaatacccactttgctgtggtcacagtggagaaggaactgtacacttgggtgctctttttttctactgtttttcttcatatgaagttccattaaagatcagcttttggcatgaaaaattaaaacttcataagacctctcagccggggatggtggttcatgtctacaatcccagcactttgggaagccgaggcaggaggatcacttgagcccaggagttcaagaccagcttgggcaacatagcgagaacccatctctttaaaatttaagtttaataaaatgtaatt

SEQ ID NO: 372 - DNA, 1690 bp, Homo sapiens
cgaccgttccggcggccattgcgaaaacttccccacggctactgcgtccacgtggcggtggcgtggggactccctgaaagcagagcggcagggcgcccggaagtcgtgagtcgagtcttcccgggctaatccatgccgggttggaggctgctgacgcaggtcggcgcccaggtgctgggtcgactcggggacggcctgggtgctgccctgggcccggggaacagaacacacatctggctttttgttagaggtcttcatggaaagagtggtacatggtgggatgagcatctttctgaagaaaatgtcccattcattaagcagttggtctctgatgaagataaagcccaattagcaagtaaactgtgtcctctgaaagatgaaccatggcctatacatccttgggaaccaggttcctttagagttggtcttattgccttgaagctgggcatgatgcctttatggaccaaggatggtcaaaagcatgtggtcacattacttcaggtacaagactgtcatgtcttaaaatatacgtcaaaggaaaactgtaatggaaaaatggcaaccctgtctgtaggaggaaaaactgtatcacgttttcgtaaagctacatccatattggaattttaccgggaacttggattgccgccgaaacagacagttaaaatctttaatataacagataatgctgcaattaaaccaggcactcctctttatgctgctcactttcgtccaggacagtatgtggatgtcacagccaaaactattggtaaaggttttcaaggtgtcatgaaaagatggggatttaaaggccagcctgctacgcatggtcaaacgaaaacccacaggagacctggagctgttgcaactggtgatattggcagagtctggcctggaactaaaatgcctggaaaaatgggaaacatatacaggacagaatatggactgaaagtgtggagaataaacacaaagcacaacataatctatgtaaatggctctgtacctggacataaaaattgcttagtaaaggtcaaagattctaaactgcctgcatataaggatctcggtaaaaatctaccattccctacatattttcctgatggagatgaagaggaactgccagaagatttgtatgatgaaaacgtgtgtcagcccggtgcgccttctattacatttgcctaacatctttggacgtggcagaaccttacatattctgtgagcttcgatgagccagagtgatatcataaccaccagaaatcatactctcctttcttagtcacaacaaaatcacacatgtcatctttgtcaagggcataaatatatcattcatacccccattaaattttgttagaaaaattaccacattaaatatatgagttaagtagattggatttgctgaaattggtgttgggcatattagcaaaatattcttaatttgtggactcgattcttttttactacatatttcccaagttatcttaagatgtctgtaaatttaacttttattaaagttttgtcaatctttgtgaaatagtggttgtggaacagtagaaaaccatatggggactatagtgcaacctatttgggtaaagaaaccatttgctaaaatggagaaagtaaatagatttttatttaaattacagaaacatgttaaaggccggacaaaggaaagacaataaaatcataaattatc

SEQ ID NO: 373 - DNA, 297 bp, Homo sapiens
gatacatactagtagctaattttcctagcctgaaattatatactgcatctgcactatgtacctactagggatctgacctcaagtgttttctgagcccaggcttcctggtgtggtgtcttttaccacataaaattattacaaattgcaaatgttggtattgtgatttgattatctgtacaaagaaagaagctctatgcagtgagtttgtggtttaatggtcacaaaaatgttagcactgctaccactcagcacgtgtaaaattttttaaatttataaatattaaaattttaaacttac

SEQ ID NO: 374 - DNA, 1150 bp, Homo sapiens
ggcgtccgggctggtaagattgctgcagcagggacatcgctgcctcctggctccagtcgcccccaagctggtccctccggttcggggagtgaagaagggattccgcgccgccttccgcttccagaaggagttagagcggcagcgccttctgcggtgcccgccgccgcccgtgcgccgttcagagaagccgaactgggattaccatgcagaaatacaagcttttggacatcggttacaggaaaacttttccttagatcttctcaaaactgcatttgttaatagctgctatattaaaagtgaggaggccaaacgccaacaacttgggatagagaaagaagctgttcttctgaatcttaaaagtaatcaagaactatccgaacaagggacatctttttcacagacttgccttacacagtttcttgaagacgagtacccagacatgcccactgaaggcataaaaaatcttgttgactttctcactggtgaggaagtcgtgtgtcacgtggctagaaacttggctgtggagcagttaacactgagtgaggaattcccagtgcccccagctgtgttacagcagactttctttgcagttattggagccctgttacagagcagtggacctgagaggactgcacttttcatcagggacttcttaattactcaaatgactggaaaagagctctttgagatgtggaagataataaatcccatggggctattggtagaagaactgaagaaaaggaatgtttcagctcctgaatcaagacttactaggcagtctggtggcaccacagctttgcctttgtattttgttggcttatactgtgataaaaagttgattgcagaaggacctggggaaacagtattggttgcagaagaagaggctgctcgagtggcccttagaaaactttatggattcacagaaaatagacggccgtggaactattccaagcccaaagaaaccttgagagcagaaaagagcatcactgccagctagccgccatggatgcagcagcctgaaacttgagagcgaaagtgagataaatgtcaaaggtgtttcaagccagacattttcacaattgtgaagaaatagatgttttgtttctgttttttactgtgttcccaaaattaaataaatgttaaccaagtc

SEQ ID NO: 375 - DNA, 623 bp, Homo sapiens
ctggagcctgatgaagaactggaagacaaccccaaccagagtgacctgattgagcaggcagccgagatgctttatggattgatccacgcccgctacatccttaccaaccgtggcatcgcccagatgttggaaaagtaccagcaaggagactttggttactgtcctcgtgtgtactgtgagaaccagccaatgcttcccattggcctttcagacatcccaggtgaagccatggtgaagctctactgccccaagtgcatggatgtgtacacacccaagtcatcaagacaccatcacacggatggcgcctacttcggcactggtttccctcacatgctcttcatggtgcatcccgagtaccggcccaagagacctgccaaccagtttgtgcccaggctctacggtttcaagatccatccgatggcctaccagctgcagctccaagccgccagcaacttcaagagcccagtcaagacgattcgctgattccctcccccacctgtcctgcagtctttgacttttcctttcttttttgccaccctttcaggaaccctgtatggtttttagtttaaattaaaggagtcgttatcgtggtgggaatatgaaataaagtagaagaaaaggcc

SEQ ID NO: 376 - DNA, 1108 bp, Homo sapiens
ggaccgagtccttggctgcctgtggagctcctgtgccagcagctgcgcccctgctgcgctccggatacccccatccccgccaccgccgacctcccgctccaccgactgctgctcacgcccgacgggttcacgccgcccctgccccgtgaaggaccgcgctgcggtgcggaggcaggatgacgcaaaacacggtgattgtgaatggagttgctatggcctctaggccatcccagcccacccacgtcaacgtccacatccaccaggagtcagctttgacacaactgctgaaagctggaggttctctgaagaagtttctttttcaccctggggacactgtgccttccacagccaggattggttatgagcagctggctctaggggtgatcgcagcaggagctggggccattgtccatgagaagcacccgggcaaacttgctggctatatatccagcctgctcaccctggcaggctttgctacagctatggctgctgttgtcctctgcgtgaatagcttcatctggcaaactgaaccctttttatacatcgacactgtgtgtgatcgctcagaccctgtcttccctaccactgggtacagatggatgcggcgaagtcaagagaaccaatggcagaaggaggagtgtagagcttacatgcagatgctgaggaagttgttcacagcaatccgtgccctgttcctggctgtctgtgtcttgaaggtcattgtgtccttggtttccttgggagtaggtcttcgaaacttgtgtggccagagctcccagcccctgaatgaggaaggatcagagaagaggctactgggggagaattcagtgcccccttcgccctctagggagcagacctccactgccattgtcctgtgagctgccaaagaccccacggggtgcccgcatgtccctgtctagggcagcccagggcccccactcctggctcctcacacttgcctcccctatggccgctctccagaccctcctcctttcttctccccacatccgcacctgctgttcccactctggggttctcaagtccatgaacagatattgttgcattttccacaatgctgattaaacataataaacaatccagaaaagcc

SEQ ID NO: 377 - DNA, 574 bp, Homo sapiens
cccacgcgtccgcctgcacagccatgcccgggcaagaactcaggacggtgaatggctctcagatgctcctggtgttgctggtgctctcgtggctgccgcatgggggcgccctgtctctggccgaggcgagccgcgcaagtttcccgggaccctcagagttgcactccgaagactccagattccgagagttgcggaaacgctacgaggacctgctaaccaggctgcgggccaaccagagctgggaagattcgaacaccgacctcgtcccggcccctgcagtccggatactcacgccagaagtgcggctgggatccggcggccacctgcacctgcgtatctctcgggccgcccttcccgaggggctccccgaggcctcccgccttcaccgggctctgttccggctgtccccgacggcgtcaaggtcgtgggacgtgacacgaccgctgcggcgtcagctcagccttgcaagaccccaggcgcccgcgctgcacctgcgactgtcgccgccgccgtcgcagtcggaccaactgctggcagaatcttcgtccgcacggccccagctggagttgcactt

SEQ ID NO: 378 - DNA, 2235 bp, Homo sapiens
cttagggcccctctctttggccatctgcctctaggtcccatcctggggcctgaagcgcttgttctctgcgctgggaaaaggggaacgatggagcgatccagcacccaaacttaccctgtccaggtggcccacgaagctacccaagacatctctgcacagccctagcctttttggcttcacccactccgttcgggagttggggacccggcctctacattccttaagggaactccagctccaggtctgagagtcactggagctaccagaagcatcatggggccctggggagagccagagctcctggtgtggcgccccgaggcggtagcttcagagcctccagtgcctgtggggctggaggtgaagttgggggccctggtgctgctgctggtgctcaccctcctctgcagcctggtgcccatctgtgtgctgcgccggccaggagctaaccatgaaggctcagcttcccgccagaaagccctgagcctagtaagctgtttcgcggggggcgtctttttggccacttgtctcctggacctgctgcctgactacctggctgccatagatgaggccctggcagccttgcacgtgacgctccagttcccactgcaagagttcatcctggccatgggcttcttcctggtcctggtgatggagcagatcacactggcttacaaggagcagtcagggccgtcacctctggaggaaacaagggctctgctgggaacagtgaatggtgggccgcagcattggcatgatgggccaggggtcccacaggcgagtggagccccagcaaccccctcagccttgcgtgcctgtgtactggtgttctccctggccctccactccgtgttcgaggggctggcggtagggctgcagcgagaccgggctcgggccatggagctgtgcctggctttgctgctccacaagggcatcctggctgtcagcctgtccctgcggctgttgcagagccaccttagggcacaggtggtggctggctgtgggatcctcttctcatgcatgacacctctaggcatcgggctgggtgcagctctggcagagtcggcaggacctctgcaccagctggcccagtctgtgctagagggcatggcagctggcacctttctctatatcacctttctggaaatcctgccccaggagctggccagttctgagcaaaggatcctcaaggtcattctgctcctagcaggctttgccctgctcactggcctgctcttcatccaaatctagggggcttcaagagaggggcaggggagattgatgatcaggtgcccctgttctcccttccctcccccagttgtggggaataggaaggaaaggggaagggaaatactgaggaccaaaaagttctctgggagctaaagatagagcctttggggctatctgactaatgagagggaagtgggcagacaagaggctggccccagtcccaaggaacaagagatggtcaagtcgctagagacatatcaggggacattaggattggggaagacacttgactgctagaatcagaggttggacactatacataagaacaggctcacatgggaggctggaggtgggtacccagctgctgtggaacgggtatggacaggtcataaacctagagtcagtgtcctgttggtcctagcccatttcagcaccctgccacttggagtggacccctcctactcttcttagcgcctaccctcatacctatctccctcctcccatctcctaggggactggcgccaaatggtctctccctgccaattttggtatcttctctggcctctccagtcctgcttactcctctatttttaaagtgccaaacaaatccccttcctctttctcaaagcacagtaatgtggcactgagccctacccagcacctcagtgaagggggcctgcttgctctttattttggtcccggatcctggggtggggcagaaatattttctgggctggggtaggaggaaggttgttgcagccatctactgctgctgtaccctaggaatatggggacatggacatggtgtcccatgcccagatgataaacactgagctgccaaaacatttttttaaatacacccgaggagcccaagggggaagggcaatgcctacccccagcgttatttttggggagggagggctgtgcatagggacatattctttagaatctattttattaactgacctgttttgggacctgttacccaaataaaagatgtttctagac

SEQ ID NO: 379 - DNA, 1543 bp, Homo sapiens
  misc_feature 776,1178,1487: n = a,c,t, or g
agctgatacttccagtgcggacaggcaaactaggcttgaaggtgctgaaattaataaaagccttttagcactcaaggagtgcatcagagccttaggtagaaataaacctcatactcctttccgtgcaagtaaactcactcaggtgttaagagattctttcataggtgaaaactctcgtacctgcatgattgccacaatctctccaggaatggcatcctgtgaaaatactcttaatacattaagatatgcaaatagggtcaaagaattgactgtagatccaactgctgctggtgatgttcgtccaataatgcaccatccaccaaaccagattgatgacttagagacacagtggggtgtggggagttcccctcagagagatgatctaaaacttctttgtgaacaaaatgaagaagaagtctctccacagttgtttactttccacgaagctgtttcacaaatggtagaaatggaagaacaagttgtagaagatcacagggcagtgttccaggaatctattcggtggttagaagatgaaaaggccctcttagagatgactgaagaagtagattatgatgtcgattcatatgctacacaacttgaagctattcttgagcaaaaaatagacattttaactgaactgcgggataaagtgaaatctttccgtgcagctctacaagaggaggaacaagccagcaagcaaatcaacccgaagagaccccgtggccctttaaaccggcatttgctgctaaaggatacccagaaccctcactactgtnacatacaacggttcagctgtaagggccatttgaaagtttggaattttaagtgtctgtggaaaatgttttgtccttcacctgaattacatttcaattttgtgaaacactcttttgtctacaaaatgcttctagtccaggaggcacaaccaagaactgggattaatgaagcattttgtttcatttacacaaatagtgatttacttttggagatccttgtcagttttattttctatttgatgaagtaagactgtggactcaatccagagccagatagtagggggaagccgacagcatttccttttaactcagttcaatttttgtagtgagactgagcagttttaaatcctttgcgtgcatgcatacctcatcagtgattgtacataccttgcccactcctagagncagctgtgctcaccttttcctgctttgtgccttgattaaggctactgaccctaaatttctgaagcacagccaggaaaaattacattccttgtcattgtaaattacctttgtgtgtacatttttactgtatttgagacattttttgtgtgtgactagttaattttgcaggatttgccatatcattgaacggaactaaagtctgtgacagtggatttggctgctggaccattccatcttatatgtaaagaaatctggaattattattttaaaaccatataacatgtgattataatttttcttagcattttntttgtaaagaactacaatataaactagttggtgtataataaaaagtaatgaaattc

SEQ ID NO: 380 - DNA, 1087 bp, Homo sapiens
ctgcgacctagatgtattcttggagtcacccagaaaaccatctggacgcagggaccgagcccccgaaaagcaaaggaggatggcagcaaacaagtgtctgtgcacaggagtcagagagggggaaccgccgtcccaacatcacaaaaagtgaaagaagccggaagagattttacctatttaatagtggtgctttttggaatcagcattacaggtggcttgttttacacgattttcaaagaacttttttcttcatccagtcctagcaagatatatgggagagccttagaaaaatgcagatcacatcctgaggtgatcggtgtctttggtgagtctgttaaaggctatggggaggtgacaaggcggggtcgccggcagcatgtcaggttcactgaatatgtaaaagatgggctgaaacacacgtgtgtgaaattctacattgagggctctgagccagggaagcaaggaacggtgtatgcgcaagtgaaagagaacccaggaagtggtgaatatgattttcgatatatatttgtagaaattgaatcttatcctagaagaactattatcattgaagataatcgatcccaagatgattaaaataatcaagcaagcaggtttctgatggatgttgaatggcgtggactcgctactccgttcttcacagctgccttccagaatgtgttcaaaagaaagacaagaaggagtgtatggcttataaagtgaatctaatacagtatttgttgcatttaaacaaactagacattttcttacggaaaaattatgaaatacagcatattttatgttctcccattgactcaatcatgacaatatttctgctttaacaccatctttcgtgattagaaatgtttgttattggaaatgttacaccatgtaaataaaggaaatagattttagtattgtattcattttatattatagaactgcataatgtctgcagaataaaattaaaactaacaaatatgtcattagcagctgccctccgcatactttggaatctgacttgagataagcatgtgaaaatggttgagggccatagggaaccagatggtaaatacattcttcaaaattg

SEQ ID NO: 381 - DNA, 2349 bp, Homo sapiens
gcagcaagaagctgacgggtcgcctcatgctggctgtgggaggagcagtgcttggctccctgcagtttggctacaacactggagtcatcaatgccccccagaaggtgatcgaggagttctacaaccagacatgggtccaccgctatggggagagcatcctgcccaccacgctcaccacgctctggtccctctcagtggccatcttttctgttgggggcatgattggctccttctctgtgggccttttcgttaaccgctttggccggcggaattcaatgctgatgatgaacctgctggccttcgtgtccgccgtgctcatgggcttctcgaaactgggcaagtcctttgagatgctgatcctgggccgcttcatcatcggtgtgtactgtggcctgaccacaggcttcgtgcccatgtatgtgggtgaagtgtcacccacagcccttcgtggggccctgggcaccctgcaccagctgggcatcgtcgtcggcatcctcatcgcccaggtgttcggcctggactccatcatgggcaacaaggacctgtggcccctgctgctgagcatcatcttcatcccagccctgctgcagtgcatcgtgctgcccttctgccccgagagtccccgcttcctgctcatcaaccgcaacgaggagaaccgggccaagagtgtgctaaagaagctgcgcgggacagctgacgtgacccatgacctgcaggagatgaaggaagagagtccgcagatgatgcgggagaagaaggtcaccatcctggagctgttccgctcccccgcctaccgccagcccatcctcatcgctgtggtgctgcagctgtcccagcagctgtctggcatcaacgctgcttctattactccacgagcatcttcgaaaaggcgggggtgcagcagcctgtgtatgccaccattggctccggtatcgtcaacacggccttcactgtcgtgtcgctgtttgtggtggagcgagcaggccggcggaccctgcacctcataggcctcgctggcatggcgggttgtgccatactcatgaccatcgcgctagcactgctggagcagctaccctggatgtcctatctgagcatcgtggccatctttgtctttgtggccttctttgaagtgggtcctggccccatcccatggttcatcgtggctgaactcttcagccagggtccacgtccagctgccattgccgttgcaggcttctccaactggacctcaaatttcattgtgggcatgtgcttccagtatgtggagcaactgtgtggtccctacgtcttcatcatcttcactgtgctcctggttctgttcttcatcttcacctacttcaaagttcctgagactaaaggccggaccttcgatgagatcgcttccggcttccggcaggggggagccagccaaagtgacaagacacccgaggagctgttccatccctgggggctgattcccaagtgtgagtcgccccagatcaccagcccggcctgctcccagcagccttaaggatctctcaggagcacaggcagctggatgagacttccaaacctgacagatgtcagccgagccgggcctggggctcctttctccagccagcaatgatgtccagaagaatattcaggacttaacggctccaggattttaacaaaagcaagactgttgctcaaatctattcagacaagcaacaggttttataatttttttattactgattttgttatttttatatcagcctgagtctcctgtgcccacatcccaggcttcaccctgaatggttccatgcctgagggtggagactaagccctgtcgagacacttgccttcttcacccagctaatctgtagggctggacctatgtcctaaggacacactaatcgaactatgaactacaaagcttctatcccaggaggtggctatggccaccccttctgctggcctggatctccccactctaggggtcaggctccattaggatttgccccttcccatctcttcctacccaaccactcaaattaatctttctttacctgagaccagttgggagcactggagtgcagggaggagaggggaagggccagtctgggctgccgggttctagtctcctttgcactgagggccacactattaccatgagaagagggcctgtgggagcctgcaaactcactgctcaagaagacatggagactcctgccctgttgtgtatagatgcaagatatttatatatatttttggttgtcaatattaaatacagacactaagttatagtatatctggacaagccaacttgtaaatacaccacctcactcctgttacttacctaaacagatataaatggctggtttttag

SEQ ID NO: 382 - DNA, 342 bp, Homo sapiens
cggacgcgtgggtgcaaaacaaaaaattttaaaagaaaatgtgacttcaaaggaaaagaacaaatttccaaagacttgggggagtgaaggcagagcctggtgcagatggacgaggtctgcagacggagggcagaggtggtggaaggggccaggggcctgcaggcctccccctggaactgggactggtctcggtctgctgacgtcagggtcagctcccccgcggagctgacttcagcagcccacagctgtggggcttcagcagccacaccagcccagcccagcccagctctcgatacgtttggtctttcatgctgaaaaataaataataaagcctgtcccgtg

SEQ ID NO: 383 - DNA, 295 bp, Homo sapiens
atgagaagatcttgctccttcagactctgacctgagtggagacctttccaccagacacagctcgggcctgtgtaattgtaggagaagacactcagcagtgattgccatggcacagagccgtggtcattgttgctgttacaaagaagaaaaccatctgagttctaactccttggttgcttaaaagtagttcccaagagtctgagaagctatttctatttttaagagtcattttttgtaatttttgtaaaacaaaagtaccaatctgttttgtaaataaaaatcatcctaaaatttg

SEQ ID NO: 384 - DNA, 549 bp, Homo sapiens
catcttttgtctttccgtggagctgtcggcatgaaggtcgagctgtgcagttttagcgggtacaagatctaccccggacacgggaggcgctacgccaggaccgacgggaaggttttccagtttcttaatgcgaaatgcgagtcggctttcctttccaagaggaatcctcggcagataaactggactgtcctctacagaaggaagcacaaaaagggacagtcggaagaaattcgaaaagcaaagagaacccgccgagcagtcaaatatcatagggccattactggtgcatctgttgctgatgtatgggccaagaggaatcagaaacctgaagttagaaaggctcaacgagaacaagctatcagggctgctaaggaagcaaaaaaggctaagcaagcatctaaaaagactgcaatggctgctgctaaggcacctacaaaggcagcacctaagcaaaagattgtgaagcctgtgaaagtttcagctccccgagttggtggaaaacgctaaactggcagattagatttttaaataaagattggattataactc

SEQ ID NO: 385 - DNA, 1881 bp, Homo sapiens
  misc_feature 649: n = a,c,t, or g
aattcttgttaaaagttgatagcaagatgatcatctggttggagaagatgttagataaaataattagcattttcatcatatttttgttagtgataggaactcttcttttagccctactcctgactgcaaaggtacatcaagagagtgtacacatgattgaagtcacaagtaatttgattaatgaaactctagcaaatcaccctgagtgggcaaattggcttcctgaggctcaggtagtccaaagagccctgaattctgcggctaacaccgtgtatcagtatggacgagaatggataactcacaagctccataaaattctaggagataaggtgaacaatactgctgtaattgaaaagcaagtactagaactttgggacagactgtatcactcttggtttgtaaagaatgtaacacactctggaaggcacaaaggacagaagttgcatgtcagtcgtcagaatagctggctgggagacattctggactggcaggatattgtttcctttgttcacgagaacattgagacatttctttcgatcttggagcctctgcggatcgatatgagccggaatgtgagcctgctgttcaccactggcactacactcttgaccatcctcttctacagcgggacagcccttctcaattttgnactctctctgataattttcctgaccacactattttatctattaagctccagcgatgagtactacaagccagtgaagtgggtgataagcctgactccactatctcagccaggtccttcttctaatattattggccagtctgtggaagaagctatcagaggggtgtttgatgcttccctcaaaatggctggcttctatggattgtatacctggctgactcatactatgtttggcatcaatattgtcttcataccatcagcattagcagcaatccttggagcagtgccattcctggggacatactgggcagcagtacctgcagttcttgacctgtggctgacacaagggttaggatgcaaggccattttactgttgatttttcatctcttgccaacatactttgtagatactgcaatctactctgacatatcaggaggtggccatccttacctgacaggcttggcagtggccggtggagcatactacctaggcctggaaggagcaatcatcggtcctattcttctctgcatacttgtggttgcttccaatatctatagtgccatgctagtgagtcccacgaattcagttcccacgccaaaccagaccccatggcctgctcagcctcagcggactttccgtgacatttctgaagatctgaaatcttcagtaggttgatgtggtttcctctgcagtgatttttctaggaagttcaaatttgacagcgagttcagctcagctgtggccctctgcccttccagctgtgcctagcaagcaaaacccaggaaagaagcagaagcctcctggccttacatacagaatgcctggacaagagagaacttgctgcgggctgctttgtattttaaaacacagcttgagagttcagagttggtggtttgctcacttaactgttgttaagatggcttgaaaagtttcattttatacactggtaccctggcttgaaatttttccactttggtcatctatgttactatattatatatttataaagttattttaagaactctaaactacctgctgttaaaagaatagatggtgtaattttttcctggtttaagaaatgtattgttaaacttttctaagacagtcacttttcaaggaagagggctttcacttttgagtgtgtagttgagtgagcaggaaaaatgaatcttctacccttctcccacaatgtattatacgctctttaagaaataataaatcataagtataaggg

SEQ ID NO: 386 - DNA, 435 bp, Homo sapiens
accgaaggtttggtcccatttgttgcccttgaattatttgtatgaattatatgttccagtgaaaatggagttctgggttggaggcttattccatgtttacacaattaaaattgcagtgttcctctctgggatgagagctctaaagcagagtaagattacgttctgatgtaagctttaaccacctatttataaggtctcacctgtggtccactgtgttgagacttctacagaagagcttctgtatagtaaccattttcttaggctgtctcacttgtgtgaatcttctgacacatttattatagctttgtcccatttcttatcctttttgctctttagaaatttccctttaatttattacattcattgcttactgtaaagagtccaggtaactgactttattcagttacttcctgttcaataaatttaacttttccc

SEQ ID NO: 387 - DNA, 945 bp, Homo sapiens
cccacgcgtccgcccacgcgtccgaaatggcggatgacgccggtgcagcgggggggcccgggggccctggtggccctgggatggggaaccgcggtggcttccgcggaggtttcggcagtggcatccggggccggggtcgcggccgtggacggggccggggccgaggccgcggagctcgcggaggcaaggccgaggataaggagtggatgcccgtcaccaagttgggccgcttggtcaaggacatgaagatcaagtccctggaggagatctatctcttctccctgcccattaaggaatcagagatcattgatttcttcctgggggcctctctcaaggatgaggttttgaagattatgccagtgcagaagcagacccgtgccggccagcgcaccaggttcaaggcatttgttgctatcggggactacaatggccacgtcggtctgggtgttaagtgctccaaggaggtggccaccgccatccgtggggccatcatcctggccaagctctccatcgtccccgtgcgcagaggctactgggggaacaagatcggcaagccccacactgtcccttgcaaggtgacaggccgctgcggctctgtgctggtacgcctcatccctgcacccaggggcactggcatcgtctccgcacctgtgcctaagaagctgctcatgatggctggtatcgatgactgctacacctcagcccggggctgcactgccaccctgggcaacttcgccaaggccacctttgatgccatttctaagacctacagctacctgacccccgacctctggaaggagactgtattcaccaagtctccctatcaggagttcactgaccacctcgtcaagacccacaccagagtctccgtgcagcggactcaggctccagctgtggctacaacatagggtttttatacaagaaaaataaagtgaattaagcgtg

SEQ ID NO: 388 - DNA, 1091 bp, Homo sapiens
gcttgaggtgtggcagggatgattttggcggcgacaggagtgacgggttccttcagaggcactttttggtagtgttttgttttgatcatatggacactcaaatcctgcagggactcaaaggagtggccacagtacatgcacttcagcaccttctgggcgtcttccttcccttccatttccagcaaggagcgtttgcgaggcttggaccagcgcttggggttgttgttatcggtctcatggttgtcgtcgcggtaatgccccgtctcgttcatgtgcaccgtcaactccaccagggtgtcgtaggcagcgctgcagtccttacagcggaacttgctggcccccgtgaagatggagccatagagcttgctgctctgccggtacagctgcacggtgctgaagaggctgggctccgggagcatgcggctctgtgacacctgctgcagcgtcttagccatggcgctctggtgccagtcgaagctcccgctgccacagctgctgctgctgctactgctgctgctgctgctgccgttgttcttctccgaggagggctggtgcaggttgaggttgaggttggaccagtaggagttggagaggaagttgttgtacacggccttcatctgctccaggctatccgacacagtcgtgtcttccagtgggaccgtgacctccttggtctcctcttcgttcttgatggagccgctttcaaagtcagccattcggtcactggtctcactgatgtgtgactcgctgtccatttcatggcaggaaaactcggcggccggggagttctggtagctggggcaggccctggcgagctccttctccgggcacatgtacttggccgagggctctccatctgccgtatgctcctctgggtctaaaccttcgtccaccagggcagcagcctttaactcttcggaaacataggctgctgcgcgccggggcgcctgctgcttcctcctcggcatgatgcttctccggcgactgccactgccgccgccgccgccgctgccgggctgaggacagggagggaggggcggcgggcccgcgggggggcgaggcgggcctgctctcagcctcccccccggaga

SEQ ID NO: 389 - DNA, 2026 bp, Homo sapiens
tggaatcccaaggctggaaaaaatcattcgattgcccacttgaattaaatttgttattaaaagaccagaacttctgactcacagtaccactgaagttactcagccaagaacgaatacaccagtcaaagaagattggaatgtcagaattaccaagctacggaagcaagtggaagagatttttaatttgaaatttgctcaagctcttggactcaccgaggcagtaaaagtaccatatcctgtgtttgaatcaaacccggagttcttgtatgtggaaggcttgccagaggggattcccttccgaagccctacctggtttggaattccacgacttgaaaggatcgtccacgggagtaataaaatcaagttcgttgttaaaaaacctgaactagttatttcctacttgcctcctgggatggctagtaaaataaacactaaagctttgcagtcccccaaaagaccacgaagtcctgggagtaattcaaaggttcctgaaattgaggtcaccgtggaaggccctaataacaacaatcctcaaacctcagctgttcgaaccccgacccagactaacggttctaacgttcccttcaagccacgagggagagagttttcctttgaggcctggaatgccaaaatcacggacctaaaacagaaagttgaaaatctcttcaatgagaaatgtggggaagctcttggccttaaacaagctgtgaaggtgccgttcgcgttatttgagtctttcccggaagacttttatgtggaaggcttacctgagggtgtgccattccgaagaccatcgacttttggcattccgaggctggagaagatactcagaaacaaagccaaaattaagttcatcattaaaaagcccgaaatgtttgagacggcgattaaggagagcacctcctctaagagccctcccagaaaaataaattcatcacccaatgttaatactactgcatcaggtgttgaagaccttaacatcattcaggtgacaattccagatgatgataatgaaagactctcgaaagttgaaaaagctagacagctaagagaacaagtgaatgacctctttagtcggaaatttggtgaagctattggtatgggttttcctgtgaaagttccctacaggaaaatcacaattaaccctggctgtgtggtggttgatggcatgcccccgggggtgtccttcaaagcccccagctacctggaaatcagctccatgagaaggatcttagactctgccgagtttatcaaattcacggtcattagaccatttccaggacttgtgattaataaccagctggttgatcagagtgagtcaaaaggccccgtgatacaagaatcagctgaaccaagccagttggaagttccagccacagaagaaataaaagagactgatggaagctctcagatcaagcaagaaccagaccccacgtggtagacctcttccctcctaggcttaaagtatcagtggttgagaagagcttttcggacctgttactaccccaagctgtgtaatatacttgtataacagaaataccttctatacaaacctttttttctacttttagatagaaatgtctactttttcagcagttctgtgaattaaagagcagagtgactgtgggtctggaatggctggtgtacttgggaatgtactatcaggattttacagcaatgctgggaaatgacagggaaaatgacaggaatgaatctcaccagattttttatgtactcagcagagccttgagttacggtgtttattttccaatcaagtgaagatatctcctacttctcctactggaacatctcagcttctgcagtgaagaaaaattcctgtgatagttcagttctttagtttttctatttgaaaaaaaaaaatcatttaaatgatcctttgttcacggctctccttaatgactgagtgaacagttcctatctgtatatttgactaaaccttttcctaagctatctctcatggttcctatgtttttttatcataattaaaagcaaaaccatctggatc

SEQ ID NO: 390 - DNA, 1974 bp, Homo sapiens
tggcattctacaaagtgaatatggaggtgagaccataccaggacctgcatttaatccagcaagtcatccagcttcagctcctacttcctcttcttcttcagcgtttcgacctgtaatgccatccaggcagattgtagaaaggcaacctcggatgctggacttcagggttgaatacagagacagaaatgttgatgtggtacttgaagacacctgtactgttggagagattaaacagattctagaaaatgaacttcagatacctgtgtccaaaatgctgttaaaaggctggaagacgggagatgtggaagacagtacggtcctaaaatctctacacttgccaaaaaacaacagtctttatgtccttacaccagatttgccaccaccttcatcatctagtcatgctggtgccctgcaggagtcattaaatcaaaacttcatgctgatcatcacccaccgagaagtccagcgggagtacaacctgaacttctcaggaagcagtactattcaagaggtaaagagaaatgtgtatgaccttacaagtatccccgttcgccaccaattatgggagggctggccaacttctgctacagacgactcaatgtgtcttgctgaatcagggctctcttatccctgccatcgacttacagtgggaagaagatcttcacctgcacagacccgggaacagtcggaagaacaaatcaccgatgttcatatggttagtgatagcgatggagatgactttgaagatgctacagaatttggggtggatgatggagaagtatttggcatggcgtcatctgccttgagaaaatctccaatgatgccagaaaacgcagaaaatgaaggagatgccttattacaatttacagcagagttttcttcaagatatggtgattgccatcctgtattttttattggctcattagaagctgcttttcaagaggccttctatgtgaaagcccgagatagaaagcttcttgctatctacctccaccatgatgaaagtgtgttaaccaacgtgttctgctcacaaatgctttgtgctgaatccattgtttcttatctgagtcaaaattttataacctgggcttgggatctgacaaaggactccaacagagcaagatttctcactatgtgcaatagacactttggcagtgttgtggcacaaaccattcggactcaaaaaacggatcagtttccgcttttcctgattattacgggaaagcgatcatctaatgaagtgttgaatgtgatacaagggaacacaacagtagatgagttaatgatgagactcatggctgcaatggagatcttcacagcccaacaacaggaagatataaaggacgaggatgaacgtgaagccagagaaaatgtgaagagagagcaagatgaggcctatcgcctttcacttgaggctgacagagcaaagagggaagctcacgagagagagatggcagaacagtttcgtttggagcagattcgcaaagaacaagaagaggaacgtgaggccatccggctgtccttagagcaagccctgcctcctgagccaaaggaagaaaatgctgagcctgtgagcaaactgcggatccggacccccagtggcgagttcttggagcggcgtttcctggccagcaacaagctccagattgtctttgattttgtagcttccaaaggatttccatgggatgagtacaagttactgagcacctttcctaggagagacgtaactcaactggacccaaataaatcattattggaggtaaagttgttccctcaagaaacccttttccttgaagcaaaagagtaaacacggcccagcggtggaaccagccattccttgacaagccagcagcctgcgtcaggagaagggctcctcgccaacccacccacacgctcgtctcactcaattcaatgtcacacttctgcctcttgcaaaattgctggaaaaagtaataataaatatagctacttaag

SEQ ID NO: 391 - DNA, 2167 bp, Homo sapiens
ctcccccggcgccctctggggctccgagcccggcgggaccatgttcaccagcaccggctccagtgggctctacaaggcgcctctgtcgaagagccttctgctggtccccagtgccctctccctcctgctcgccctcctcctgcctcactgccagaagctctttgtgtatgaccttcacgcagtcaagaacgacttccagatttggaggttgatatgtggaagaataatttgccttgatttgaaagatactttctgcagtagtctgcttatttataattttaggatatttgaaagaagatatggaagcagaaaatttgcatcctttttgctgggttcctgggttttgtcagccttatttgactttctcctcattgaagctatgcagtatttctttggcatcactgcagctagtaatttgccttctggattcctggcacctgtgtttgctctgtttgtaccattttactgctccataccaagagtccaagtggcacaaattctgggtccgttgtccatcacaaacaagacattgatttatatattgggactgcagcttttcacctctggttcctacatctggattgtagccataagtggacttatgtccggtctgtgctacgacagcaaaatgttccaggtgcatcaggtgctctgcatccccagctggatggcaaaattcttttcttggacacttgaacccatcttctcttcttcagaacccaccagcgaagccagaattgggatgggagccacgctggacatccagagacagcagagaatggagctgctggaccggcagctgatgttctctcagtttgcacaagggaggcgacagagacagcagcagggaggaatgatcaattggaatcgtctttttcctcctttacgtcagcgacaaaacgtaaactatcagggcggtcggcagtctgagccagcagcgccccctctagaagtttctgaggaacaggtcgcccggctcatggagatgggattttccagaggtgatgctttggaagccctgagagcttcaaacaatgacctcaatgtcgccaccaacttcctgctgcagcactgatagtcccaggccaacactgggaccggaccggcagccgagtgacagtgcgtggtccccaccatcagatcagcccggggaccgagcatctctggtgctgatgttcttgtgggaagagggaggttccaccgcacccctgccctcaaccgcaagactgttgccgttttagtgtggagataagtttgccattacattagcatgtattttctatctatattttttattgggcattttccctaggttggagagtcagcactcgttttgaatgtgtttaaaatgcattaaaatggaagatttctgcaggcagttgaatggcactccagatggggaattgctgtaaccctcttactgtaacatgtcatctcctgcgtcgtgatggggagagggtaatgttacttcacaaaggacatgtcagatccttcttcatggacttttttagttactgttttttctctcaaacttgttttcgaatctcctgggagtgagggagaaacagggagctgaatcctcccccaagctgttccaggccagaggactctgcagtaccttctcctacatctagtaacaaagaatggtgataaccatgcactggttcaaggttctggagttctccatgaaacttgggttaattttgctcagagtatccggagttagccactaggctgcgggtgaaatgggatggagtagaacaacagcaggcttcctggagccacatgggctgactagggcactctgtggctggcctggcacgggctcagcccaggaagaggagaaacgatcccttgcctgcccctccctgtggcagggctaactgcctggccctcctggctcgcagccagccagccccctggcagcaggttctcctcagggcttgggtcttcaacctgtggcgacaggaggcagggcagactgtggaggacaggatgcaggtcagggagagggaaggcaggggtggaccgccatgagcatgaaaagacccgaagcaagttgactcttgcaatgtgcaactgttatgttctgcaaaatgagcaacgatgtatcaaattgatgcaaatttagatgttgatacttacaataaagtttttaatgtgtttt

SEQ ID NO: 392 - DNA, 475 bp, Homo sapiens
tcgactcggtcctgtttcgacagcgaacatgtcgcggcctgtcagaaataggaaggttgttgattactcacagtttcaggaatctgatgatgcagatgaagattatggaagagattcgggccctcccactaagaaaattcgatcatctccccgagaagctaaaaataagaggcgatctggaaagaattcacaggaagatagtgaggactcagaagacaaagatgtgaagaccaagaaggatgattctcactcagcagaggatagtgaagatgaaaaagaagatcataaaaatgtgcgccaacaacggcaggcggcatctaaagcagcttctaaacagagagagatgctcatggaagatgtgggcagtgaggaagaacaagaagaggaggatgaggcaccattccaggagaaagattccggcagcgatgaagatttcctaatggaagatgatgacgatagtgactatggcagttcg

SEQ ID NO: 393 - DNA, 1512 bp, Homo sapiens
cccaaggccaacagagagaagatgactcagattatgtttgagaccttcaacaccccggccatgtacgtggccatccaggccgtgctgtccctctacgcctctgggcgcaccactggcattgtcatggactctggagacggggtcacccacacggtgcccatctacgagggctacgccctcccccacgccatcctgcgtctggacctggctggccgggacctgaccgactacctcatgaagatcctcactgagcgaggctacagcttcaccaccacggccgagcgggaaatcgtgcgcgacatcaaggagaagctgtgctacgtcgccctggacttcgagcaggagatggccaccgccgcatcctcctcttctctggagaagagctacgagctgcccgatggccagttcatcaccattggcaatgagcggttccggtgtccggaggcgctgttccagccttccttcctgggtatggaatcttgcggcatccacgagaccaccttcaactccatcatgaagtgtgacgtggacatccgcaaagacctgtacgccaacacggtgctgtcgggcggcaccaccatgtatccgggcattgccgacaggatgcagaaggagatcaccgccctggcgcccagcaccatgaagatcaagatcatcgcacccccagagcgcaagtactcggtgtggatcggtggctccatcctggcctcactgtccaccttccagcagatgtggattagcaagcaggagtacgacgagtcgggcccctccatcgtccaccgcaaatgcttctaaacggactcagcagatgcgtagcatttgctgcatgggttaattgagaatagaaatttgcccctggcaaatgcacacacctcatgctagcctcacgaaactggaataagccttcgaaaagaaattgtccttgaagcttgtatctgatatcagcactggattgtagaacttgttgctgattttgaccttgtattgaagttaactgttccccttggtatttgtttaataccctgtacatatctttgagttcaacctttagtacgtgtggcttggtcacttcgtggctaaggtaagaacgtgcttgtggaagacaagtctgtggcttggtgagtctgtgtggccagcagcctctgatctgtgcagggtattaacgtgtcagggctgagtgttctgggatttctctagaggctggcaagaaccagttgttttgtcttgcgggtctgtcagggttggaaagtccaagccgtaggacccagtttcctttcttagctgatgtctttggccagaacaccgtgggctgttacttgctttgagttggaagcggtttgcatttacgcctgtaaatgtattcattcttaatttatgtaaggttttttttgtacgcaattctcgattctttgaagagatgacaacaaattttggttttctactgttatgtgagaacattaggccccagcaacacgtcattgtgtaaggaaaaataaaagtgctgccgtaacc

SEQ ID NO: 394 - DNA, 489 bp, Homo sapiens
ctgaggacctacctcttcacctacagcagtgtctatgactccatcagcatggagacgctgtcagacatgtttgagctggatctgcccactgtgcactccatcatcagcaaaatgatcattaatgaggagctgatggcctccctggaccagccaacacagacagtggtgatgcaccgcactgagcccactgcccagcagaacctggctctgcagctggccgagaagctgggcagcctggtggagaacaacgaacgggtgtttgaccacaagcagggcacctacgggggctacttccgagaccagaaggacggctaccgcaaaaacgagggctacatgcgccgcggtggctaccgccagcagcagtctcagacggcctactgagctctccactctgtttcccgcctgggccatccaaccttgaagtcctaaaccacacctcagtcactaaaggtctgtttaaagttgttctggttgattgcttgttgccac

SEQ ID NO: 395 - DNA, 380 bp, Homo sapiens
ggcggattagccttcgcggggcaaaatggagctcgaggccatgagcagatataccagcccagtgaacccagctgtcttcccccatctgaccgtggtgcttttggccattggcatgttcttcaccgcctggttcttcgtttacgaggtcacctctaccaagtacactcgtgatatctataaagagctcctcatctccttagtggcctcactcttcatgggctttggagtcctcttcctgctgctctgggttggcatctacgtgtgagcacccaagggtaacaaccagatggcttcactgaaacctgcttttgtaaattacttttttttactgttgctggaagtgtcccacctgctgctcataataaatgcagatgtatagc

SEQ ID NO: 396 - DNA, 1542 bp, Homo sapiens
aggtgctgggtccttcggcaggaggaggaagatggagcccagcaccgcggcccgggcttgggccctcttttggttgctgctgcccttgcttggcgcggtttgcgccagcggaccccgcaccttagtgctgctggacaacctcaacgtgcgggagactcattcgcttttcttccggagcctgaaggaccggggctttgagctcacattcaagaccgctgatgaccccagcctgtctctcataaagtatggggaattcctctatgacaatctcatcattttctccccttcggtagaagattttggaggcaacatcaacgtggagaccatcagtgcctttattgacggcggaggcagtgtgctggtagctgccagctccgacattggtgaccctcttcgagagctgggcagtgagtgcgggattgagtttgacgaggagaaaacggctgtcattgaccatcacaactatgacatctcagaccttggccagcatacgctcatcgtggctgacactgagaacctgctgaaggccccaaccatcgttgggaaatcatctctaaatcccatcctctttcgaggtgttgggatggtggccgatcctgataaccctttggtgctggacatcctgacgggctcttccacctcttactccttcttcccggacaagcctatcacccagtatccacatgcggtggggaagaacaccctcctcattgctgggctccaggccaggaacaatgcccgcgtcatcttcagcggctccctcgacttcttcagcgactccttcttcaactcagcagtgcagaaggcggcgcccggctcccagaggtattcccagacaggcaactatgaactagctgtggccctctcccgctgggtgttcaaggaggagggtgtcctccgtgtggggcctgtgtcccatcatcgggtgggcgagacagcccacccaatgcctacactgtcactgacctagtggagtatagcatcgtgatccagcagctctcaaatggcaaatgggtcccctttgatggcgatgacattcagctggagtttgtccgcattgatccttttgtgaggaccttcctgaagaagaaaggtggcaaatacagtgttcagttcaagttgcccgacgtgtatggtgtattccagtttaaagtggattacaaccggctaggctacacacacctgtactcttccactcaggtatccgtgcggccactccagcacacgcagtatgagcgcttcatcccctcggcctacccctactacgccagcgccttctccatgatgctggggctcttcatcttcagcatcgtcttcttgcacatgaaggagaaggagaagtccgactgaggggctagagccctctccgcacagcgtggagacggggcagggaggggggttattaggattggtggttttgttttgctttgtttaaagccgtgggaaaatggcacaactttacctctgtgggagatgcaacactgagagccaaggggtgggagttgggataatttttatataaaagaagtttttccccttttt

SEQ ID NO: 397 - DNA, 1874 bp, Homo sapiens
acaaggggctgctgctgctgctgggaatcttccttgcttatgagaccaagagtgtgtccactgagaagatcaatgatcaccgggctgtgggcatggctatctacaatgtggcagtcctgtgcctcatcactgctcctgtcaccatgattctgtccagccagcaggatgcagcctttgcctttgcctctcttgccatagttttctcctcctatatcactcttgttgtgctctttgtgcccaagatgcgcaggctgatcacccgaggggaatggcagtcggaggcgcaggacaccatgaagacagggtcatcgaccaacaacaacgaggaggagaagtcccggctgttggagaaggagaaccgtgaactggaaaagatcattgctgagaaagaggagcgtgtctctgaactgcgccatcaactccagtctcggcagcagctccgctcccggcgccacccaccgacacccccagaaccctctgggggcctgcccaggggaccccctgagccccccgaccggcttagctgtgatgggagtcgagtgcatttgctttataagtgagggtagggtgagggaggacaggccagtagggggagggaaagggagaggggaagggcaggggactcaggaagcagggggtccccatccccagctgggaagaacatgctatccaatctcatctcttgtaaatacatgtccccctgtgagttctgggctgatttgggtctctcatacctctgggaaacagacctttttctctcttactgcttcatgtaattttgtatcacctcttcacaatttagttcgtacctggcttgaagctgctcactgctcacacgctgcctcctcagcagcctcactgcatctttctcttcccatgcaacaccctcttctagttaccacggcaacccctgcagctcctctgcctttgtgctctgttcctgtccagcaggggtctcccaacaagtgctctttccaccccaaaggggcctctccttttctccactgtcataatctctttccatcttacttgcccttctatactttctcacatgtggctccccctgaattttgcttcctttgggagctcattcttttcgccaaggctcacatgctccttgcctctgctctgtgcactcacgctcagcacacatgcatcctcccctctcctgcgtgtgcccactgaacatgctcatgtgtacacacgcttttcccgtatgctttcttcatgttcagtcacatgtgctctcgggtgccctgcattcacagctacgtgtgcccctctcatggtcatgggtctgcccttgagcgtgtttgggtaggcatgtgcaatttgtctagcatgctgagtcatgtctttcctatttgcacacgtccatgtttatccatgtactttccctgtgtaccctccatgtaccttgtgtactttcttcccttaaatcatggtattcttctgacagagccatatgtaccctaccctgcacattgttatgcacttttccccaattcatgtttggtggggccatccacaccctctccttgtcacagaatctccatttctgctcagattccccccatctccattgcattcatgtactaccctcagtctacactcacaatcatcttctcccaagactgctcccttttgttttgtgtttttttgaggggaattaaggaaaaataagtgggggcaggtttggagagctgcttccagtggatagttgatgagaatcctgaccaaaggaaggcacccttgactgttgggatagacagatggacctatggggtgggaggtggtgtccctttcacactgtggtgtctcttggggaaggatctccccgaatctcaataaaccagtgaacagtgtgactcggc

SEQ ID NO: 398 - DNA, 1186 bp, Homo sapiens
ctccttcaacctccctagaggacagccccactctgcctcctgctcccccagggcagcaccatgtggcccctgtggctctgctgggcactctgggtgctgcccctggctggccccggggcggccctgaccgaggagcagctcctgggcagcctgctgcggcagctgcagctcagcgaggtgcccgtactggacagggccgacatggagaagctggtcatccccgccacgtgagggcccagtatgtagtcctgctgcggcgcagccacggggaccgctcccgcggaaagaggttcagccagagcttcgagaggtggccggcaggttcctggcgtcggaggccagcacacacctgctggtgttctccattgagccctctaactgaacgtgtgcatagaggtggtcttaatgtaggtcttaactttatacttagcaagttactccatcccaatttagtgctcctgtgtgaccttcgccctgtgtccttccatttcctgtctttcccgtccatcacccatcctaagcacttacgtgagtaaataatgcagctcagatgctgagctctagtaggaaatgctggcatgctgattacaagatacagctgagcaatgcacacattttcagctgggagtttctgttctctggcaaattcttcactgagtctggaacaataataccctatgattagaactggggaaacagaactgaattgctgtgttatatgaggaattaaaaccttcaaatctctatttcccccaaatactgacccattctggacttttgtaaacatacctaggcccctgttcccctgagagggtgctaagaggaaggatgaagggcttcaggctgggggcagtggacagggaattgggatacctggattctggttctgacagggccacaagctaggatctctaacaaacgcagaaggctttggctcgtcatttcctcttaaaaaggaggagctgggcttcagctctaagaacttcattgccctggggatcagacagcccctacctacccctgcccactcctctggagactgagccttgcccgtgcatatttaggtcatttcccacactgtcttagagaacttgtcaccagaaaccacatgtatttgcatgttttttgttaatttagctaaagcaattgaatgtagatactcagaagaaataaaaaatgatgtttc

SEQ ID NO: 399 - DNA, 2749 bp, Homo sapiens
gatcgaatggccaagtaccaggcagctgtgtccaaacaaagcagctcaaccaactatacaaatgagctgaaagccagtggtggcgaaatcaaaattcataaaatggagcaaaggagaatgtgcccccaggtcctgaggtctgcatcacccatcaggaaggggaaaagatttctgcaaatgagaatagcctggcagtccgttccacccctgccgaagatgactcccgtgactcccaggttaagagtgaggttcaacagcctgtccatcccaagccactaagtccagattccagagcctccagtctttctgaaagttctcctcccaaagcaatgaagaagtttcaggcacctgcaagagagacctgcgtggaatgtcagaagacagtctatccaatggagcgtctcttggccaaccagcaggtgtttcacatcagctgcttccgttgctcctattgcaacaacaaactcagtctaggaacatatgcatctttacatggaagaatctattgtaagcctcacttcaatcaactctttaaatctaagggcaactatgatgaaggctttgggcacagaccacacaaggatctatgggcaagcaaaaatgaaaacgaagagattttggagagaccagcccagcttgcaaatgcaagggagacccctcacagcccaggggtagaagatgcccctattgctaaggtgggtgtcctggctgcaagtatggaagccaaggcctcctctcagcaggagaaggaagacaagccagctgaaaccaagaagctgaggatcgcctggccaccccccactgaacttggaagttcaggaagtgccttggaggaagggatcaaaatgtcaaagcccaaatggcctcctgaagacgaaatcagcaagcccgaagttcctgaggatgtcgatctagatctgaagaagctaagacgatcttcttcactgaaggaaagaagccgcccattcactgtagcagcttcatttcaaagcacctctgtcaagagcccaaaaactgtgtccccacctatcaggaaaggctggagcatgtcagagcagagtgaagagtctgtgggtggaagagttgcagaaaggaaacaagtggaaaatgccaaggcttctaagaagaatgggaatgtgggaaaaacaacctggcaaaacaaagaatctaaaggagagacagggaagagaagtaaggaaggtcatagtttggagatggagaatgagaatcttgtagaaaatggtgcagactccgatgaagatgataacagcttcctcaaacaacaatctccacaagaacccaagtctctgaattggtcgagttttgtagacaacacctttgctgaagaattcactactcagaatcagaaatcccaggatgtggaactctgggagggagaagtggtcaaagagctctctgtggaagaacagataaagagaaatcggtattatgatgaggatgaggatgaagagtgacaaattgcaatgatgctgggccttaaattcatgttagtgttagcgagccactgccctttgtcaaaatgtgatgcacataagcaggtatcccagcatgaaatgtaatttacttggaagtaactttggaaaagaattccttcttaaaatcaaaaacaaaacaaaaaaacacaaaaaacacattctaaatactagagataactttacttaaattcttcattttagcagtgatgatatgcgtaagtgctgtaaggcttgtaactggggaaatattccacctgataatagcccagattctactgtattcccaaaaggcaatattaaggtagatagatgattagtagtatattgttacacactattttggaattagagaacatacagaaggaatttaggggcttaaacattacgactgaatgcactttagtataaagggcacagtttgtatatttttaaatgaataccaatttaattttttagtatttacctgttaagagattatttagtctttaaattttttaggttaattttcttgctgtgatatatatgaggaatttactactttatgtcctgctctctaaactacatcctgaactcgacgtcctgaggtataatacaacagagcactttttgaggcaattgaaaaaccaacctacactcttcggtgcttagagagatctgctgtctcccaaataagcttttgtatctgccagtgaatttactgtactccaaatgattgctttcttttctggtgatatctgtgcttctcataattactgaaagctgcaatattttagtaataccttcgggatcactgtcccccatcttccgtgttagagcaaagtgaagagtttaaaggaggaagaagaaagaactgtcttacaccacttgagctcagacctctaaaccctgtatttcccttatgatgtcccctttttgagacactaatttttaaatacttactagctctgaaatatattgatttttatcacagtattctcagggtgaaattaaaccaactataggcctttttcttgggatgattttctagtcttaaggtttggggacattataaacttgagtacatttgttgtacacagttgatattccaaattgtatggatgggagggagaggtgtcttaagctgtaggcttttctttgtactgcatttatagagatttagctttaatattttttagagatgtaaaacattctgctttcttagtcttacctagtctgaaacatttttattcaataaagattttaattaaaatttg

SEQ ID NO: 400 - DNA, 1167 bp, Homo sapiens
tggaaaaccaacatcccagcaaacaccaagtacaagaatgcaaatgcaaccactttgagttatttggtgactggtttaaagccgaatacactctatgaattctctgtgatggtgaccaaaggtcgaagatcaagtacatggagtatgacagcccatgggaccacctttgaattagttccgacttctccacccaaggatgtgactgttgtgagtaaagaggggaaacctaagaccataattgtgaattggcagcctccctccgaaaccaatggcaaaattacaggttacatcatatattacagtacagatgtgaatgcagagatacatgactgggttattgagcctgttgtgggaaacagactgactcaccagatacaagagttaactcttgacacaccatactacttcaaaatccaggcacggaactcaaagggcatgggacccatgtctgcgctgtcccattcagcatgacgaccttcaccaggacctgacttcaaacctgagtctggaagtcttggaacttacccttgaaaacaaggaattgtacagagtacgagaggacagcacttgagaacacagaatgagccagcagactggccagcgcctctgtgtagggctggctccaggcatggccacctgccttcccctggtcagcctggaagaagcctgtgtcgaggcagcttccctttgcctgctgatattctgcaggactgggcaccatgggccaaaattttgtgtccagggaagaggcgagaagtgcaacctgcatttcactttgtggtcaggccgtgtctttgtgctgtgactgcatcacctttatggagtgtagacattggcatttatgtacaattttatttgtgtcttattttattttaccttcaaaaacaaaaacgccatccaaaaccaaggaagtccttggtgttctccacaagtggttgacatttgactgcttgttccaattatgtatggaaagtctttgacagtgtgggtcgttcctggggttggcttgttttttggtttcatttttattttttaattttgagtcattgcatcctctaccagctgttaatccatcactctgagggggaggaaatgttgcattgctgtttgtaagctttttttattatttttttattataattattaaaggcctgactctttcctctc

SEQ ID NO: 401 - DNA, 1004 bp, Homo sapiens
cccaaagagactctagaacagcagaagcgcatctgtgagatggcagcctatttcacccactcaaacctgcagcctgtgcacatgatcctggtgctgcgtacagccctcaatctgttcttcaagctcaagaacttcaagacagctgccacctttgctcggcgcctactagaactcgggcccaagcctgaggtggcccaacagacccgaaaaatcctgtctgcctgtgagaagaatcccacagatgcctaccagctcaattatgacatgcacaacccctttgacatttgtgctgcatcatatcggcccatctaccgtggaaagccagtagaaaagtgtccactcagtggggcctgctattcccctgagttcaaaggtcaaatctgcagggtcaccacagtgacagagattggcaaagatgtgattggtttaaggatcagtcctctgcagtttcgctaaggccccctttgtgtgcatgggtcagtcaccatatgttccccccagagaatgtgtctatatcctccttctaacagcaccttccccctgcagctactcttcagatctggctctctgtaccctaaaacctagtatctttttctcttctatggaaaatccgaagttctaaacttgacttttttgaggtcttctcaacttgactacagttgtgctcataattgtccttgcctttccagcttaattattttaaggaacaaatgaaaactctgggctgggtggagtggctcatacctgtaatcccagcactttgggaggctacggtgggcagatcatctgaggccaggagttcgagacctgcctggccaacatggcaacaccccgtctctaataaaaatataaaaattagcctggcatggtagcatgcgcctatagtcccagctgctcaggaggctgaggcatgagaatcgcttgaacctaggaggtggaggttgcattcaactgagatcataccacttcattccagcctgggtgacagagcaagactctgtctc

SEQ ID NO: 402 - DNA, 1518 bp, Homo sapiens
caacaacagtagtaactatagttaatatctatctattgagttattgtgtgacagttacttggataagtactttaatgcattctcattttaatcctcacagctaccctatgaggctgttactgttcttatccccattgtattgataaggaaactgcccagggtactcagctaagaagaggattgctttgggcataggaagcagaatgacgagttcagtcttcctcagtagttggagcacagttctcaaagcccatcaacactttggaatggatttgttgttttatttatgccatcaagggagagttgatatttgtgtattgctaaaaactactaaagtatgtcgatgcttaggtaggaacatacaaaccatatatcctctgggatctgcccaggtttctgtataaggcttgacctacgtaagatcctatgatgaagaccagaaaactttttttaaaagtaggtaaattaaaattaaaatcacgagtttgttcacatttgtcccataggttcctagtgcaaaaatgcagggagataaaagcaaacatttgaactcagtgaagtgagagtctttgggaactcctagatgttagaaatagcaccggggcatcaggtagccaacgttcaattcacttttcacgtttgtgtttttgtagctttagagctgatgagtctgattggtttggaagagagagttttaatttatgatgtcactgtgagaactgttgtgaaaattttgtaagaaaatacagtaatctgttgattttttcctgtagttttggctttcacatccctttggctgtgtttaagttcaagagcatgccaaggccatgagggtcctggcttgcacttcttgggaacagggcatgctagaggtgggtcatgaagctttcaaggtcactgttccagcccgaccctgcgcaatttaggcattgcctttatgtctctcctctctggaacttcatgtagcagcctaacaccggggccgagttgcctttactctattttctatgatgaatacttgtggagaaactgtgacaaatccattgatcctgatatttttattgttggagtcttgttgattctctatgaataatttctatttgattgtactgtgtagagttaatacccactagggatatgttaataaagctacaaatgcatagtgtaatatagaatagcaagatttttttgtgaacaatttatatagaagagtaagttgttttttaagtgttaggctcatttcttttagaaacttaaaatgttataaaagttttttaaacattcaatatttttaattataagagacatttgttactagagccaattatttcaggtgttctaattggagtgttgattttattacctcatatacctctagaatgccacgtgttctgttggggataaaattgcacaataaatgtcaagtctctgttaagtgttttaacttggtttttgcatctttctaattcattgtaaatacttttctgtttctttgaatacataacttttctctccctg

SEQ ID NO: 403 - DNA, 869 bp, Homo sapiens
tacaatttatgtgatcaatttatcatcagttttcagcattagaatataaatttcatgcaggcagagacattatcttggttatcaccctatcttcaatacctgaaacaatactccattgaaatagtttgctacaaatactcaataagtatctgttaaaacaatggataccgcttcgctgcccatttgtggccgtttatcttcctctggcccataatttacacattgttctttttcttatttcatacctgtgtgtactataattattttcatattatcccttttatgactaactatttttattgtcagcacaaggatctgaggaatgggatgcagttattttaccccgttacataagtagtatagcttgccatttctttatttggtagtgtggctttaagcagcatcattggttgtgtttgtttttgttttgtcctttggaatgatctctgggggcttgataagacatgttaaagacatgcctcctgttttttgttgttattgttgttttgttttgttttgttttgtttttgagacagagtctcgctctgtcgcctaggctcaagtgcagtggcgcaattggctcactgcaacctctgcctccaaaattcaagcgattcttctgcctcagcctgcctcctgtgtagctggaattaaaggtgcacaccactatgcctggctactttttttgtattgctagtagagatggggtttcgccatgttggccaggctggtcttgagctcctgccctcaagtgatccgcccgcctggccctcccaaagtgctaggattacaggcgtgagctaccgtgcccagccttgtctcctgtttatagaatcacttgaacccaggagtttttgagacttcatctc

SEQ ID NO: 404 - DNA, 814 bp, Homo sapiens
  misc_feature 321,644,709,749,812: n = a,c,t, or g
atgaacttctgggaagagaggaacctgggtctgggctgacgtccaagggcgggctgggtgacggtccctctgatcacggaccctgtccacccactgcccagggccctgcctcgacccctctgaccagccaccgagccccagagggatctccatgaatgtcagagacattgactggaggccttatctccagtgggagaccccttctcttcccactgtgggccggttccagcctgggctgtccaggaagtgacctctcagggcctgggaagggtgtggccagtggttcttggttgtactcaactcatctgccttgggtctaangctggggtgaatggaagggcccacctggaccctggagggacaccaggctcatactaaaatcccaaaaagtgaaaagctttccccaggcccaagcagagaaactggaccttgaagctacatctctggacttagtcctcaaagtaggagacatttgcctctaagctgttctctcccaccccacctttctgtgagccgccggttccctgttgtccacatcaagctgtgtgctgggcactgggtgcaggaatagcttgaccacagtctctatcctgggggtaaaagggtgagcagcccacagagggatggactgcaaacagacagtnccaaagtgccatgagagaagctctcagggcctgggcgtgatggttcatgcctggaatcccagccnctttgggaggccgaggtgggtggatcagttgaggtcaggngttcgagccccgcctgggcaacggggcgagcccctttctcaaaaaaataaataaaatatttgnac

SEQ ID NO: 405 - DNA, 1148 bp, Homo sapiens
  misc_feature 204: n = a,c,t, or g
agcaccttcgtgctcgtctccgtggtggcgctggcgctcaacaccgtggaagagatgcagcagcactcggggcagggcgagggcggcccagacctgcggcccatcctggagcacgtggagatgctgtgcatgggcttcttcacgctcgagtacctgctgcgcctagcctccacgcccgacctgaggcgcttcgcgcgcagcccntcaacctggtggacctggtggccatcctgccgctctaacttcagctgctgctcgagtgcttcacgggcgagggccaccaacgcggccagacggtgggcagcgtgggtaaggtgggtcaggtgttgcgcgtcatgcgcctcatgcgcatcttccgcatcctcaagctggcgcgccactccaccggactgcgtgccttcggcttcacgctgcgccagtgctacaagcaggtgggctgcctgctgctcttcatcgccatgggcatcttcactttctctgcggctgtctactctgtggagcacgatgtgcccagcaccaacttcactaccatcccccactcctggtggtgggccgcggtgagcatctccaccgtgggctacggagacatgtacccagagacccacctgggcaggttttttgccttcctctgcattgcttttgggatcattctcaacgggatgcccatttccatcctctacaacaagttttctgattactacagcaagctgaaggcttatgagtataccaccatacgcagggagaggggagaggtgaacttcatgcagagagccagaaagaagatagctgagtgtttgcttggaagcaacccacagctcaccccaagacaagagaattagtattttataggacatgtggctggtagattccatgaacttcaaggcttcattgctctttttttaatcattatgattggcagcaaaaggaaatgtgaagcagacatacacaaaggccatttcgttcacaaagtactgcctctagaaatactcattttggcccaaactcagaatgtctcatagttgctctgtgttgtgtgaaacatctgaccttctcaatgacgttgatattgaaaacctgaggggagcaacagcttagatttttcttgtagcttctcgtggcatctagctcaataaatatttttggacttg

SEQ ID NO: 406 - DNA, 878 bp, Homo sapiens
ggaggaggaggcaccggctgcattgttttcgggatcgaggggtgagggcgctatggcacccggctgcaaaactgagttacgcagcgtgacaaatggtcagtctaaccaaccaagtaatgaaggtgatgccatcaaagtttttgtgcgaattcgtcctcctgcagaaagatctgggtcagctgatggagagcagaacttatgcttatctgtgctgtcctccacgagtctccggctgcactccaaccctgagcccaagaccttcacgtttgatcatgttgcagatgtggataccactcaggaatctgtattcgcaactgtggctaaaagcattgtggagtcttgcatgagcggttataatggtaccatctttgcatatggacaaactggctcctgcaaggtcagctggatgatattaaaagacaaaaggaaaacagtgatcagaatcatccagataatcaacagctgaagaatgaacaagaagaaagtatcaaagaaagacttgcaaaaagtaaaatagttgaagaaatgctgaaaatgaaagcagacctagaagaagtccaaagtgccctttacaacaaagagatggaatgccttagaatgactgatgaagtcgaacgaacccaaactttggagtctaaagcattccagggaaaagaacaactgagatcaaagctggaagaaatgtatgaagaaagagagagaacatcccaggagatggaaatgttaaggaagcaggtggagtgtcttgctgaggaaaatggaaagttggtaggtcaccaaaatttgcatcagaagattcagtacgtagtgcgactaaagaaggaaaatgtcaggcttgctgaggagacagaaaagttgcgtgccgaaaatgtattttt

SEQ ID NO: 407 - DNA, 1832 bp, Homo sapiens
  misc_feature 553,613,678,805: n = a,c,t, or g
gccgggtcccgtcccccgggagcatcgctcggctcagcaccttggctcccagtgggggccccgtggagggcgcccgtagtgataagcacaccggcacgaacatcaggtccattcctcgaagtcggagccctcactctgccctgtcctggggctggctgagggcgaacgccccacctcactttctagagccctgtctgtcctagctcctatctgaccttgtgtgtaaatacgtacatctgtttttaaagtggatgggcccctgagaactcagtgaaatgcagagttctccatgcacctaaagctcctttgtcgctctcatggctgtcagatcctggtccctccacactgggtgctggggagggaggaccctcggggctaccgcgcgcccccccatcccacagatcaggagccaaggagggagaacagggcagcctgtgggactctaggatgcttcagaagaagcgacggcaccgtcaaccctctgttttttaaaggtggttggagactgttaacactgagctcattgacttctagagattttatttttactggntgatctcttggtggttttcaacttcctgctggaaactagaggtggggcaccccccacccnccagcctcgcactgtgtccttggggaaggcccgccccatcctggccggtgtcactgtggcccggncacccctgagcgcccagcttcctacctactggacgtctctgagagtcaagcagagcagagggcagcgctcggccggtcatgctggctcccttggccttgcagcgagcccctgcccacgccgagcganggatgcttctcctacagcatgtccactcccccggcatggccaggtggggcccctggggcaatggcagtggtagaacgctcaacttggttgcggtaccatcagcccacctgcatttggcttttcgacttgtttgttataagtcacagcgccttcatctttttagcaaggtaaaacacccaaaatgggtgttatctctgatatcttgaaaccagcgttctgaatagaggtaggttgagttttctaggggaaaacaaatggagaaaagaggcatgaagaaaagtaaaccgagaacataattaggcatcgggcctaagtgtcctggggagattggaggggacggcagcgttctgcatgatggaggcgctgccgggccccgggtctgtggggcccgtgctctcagggcgtgtgcgggacgccacctgtgcacacctgctcagagcacggctcctcgcaggggtgaaggggcagaccaacgaaaccagatgagaccaacgacaccatgcgagacacgcttgcagacactgttgttttggaaatgtgcttccctccatctgaaatctcatccctccacccgcccactcgggcagctgtgccgtgggcagggaatgcgcccccctgggtgagccccccagagattctcctgcacctccctcatcccgcacgctgctcatccgtccccatgtgtgtttaaatccatgccattcactcacccactaacccctgcaaaatctttaaggaaaaaagctgaagggtacgaccatgcacatatgtgacctggaaaatgcaaatttagatcttttatgatttaattattattgtttcccatagaagttccctccctttgaaattaatatataatgtataaattctgcactgagccatggcggagctgggcagcccctaggttagagtggagacggagcgcccaggcgcaggggtcacacctcatctggtttccttcccatctcacagcttagcttgtgcttctcaacaccaagtctttaagagcaataaaaactacaccatg

SEQ ID NO: 408 - DNA, 2596 bp, Homo sapiens
  misc_feature 1282,2371: n = a,c,t, or g
ggctcctgacaccttcatcctgaacgtcacggagggccagatcagcacagaggtgactcgctactacctgtattgcagccagagtggaagcagccccttccagcagaccctgaccaccttccagcgcgcactcaccaccatgcagatccaggtcgcggggctgctgcagtttgccgtgcccctcttctccactgcagaggaagacctgcttgcaatccagctcctgctgaactcctcagagtccagccttcaccagctgactgccatggtggactgccgagggctgcacaaggattatctggacgctcttgctggcatctgctacgacggcctccaaggcttgctgtaccttggcctcttctccttcctggccgccctcgccttctccacacatgatctgtgcggggccaaggggctggaagcacttcaccaccagaaacagagaatacgatgacattgatgatgatgacccctttaacccccaagcctggcgcatggcggctcacaagtcccccgaggggacagcttcacagcttctgcagctacagcagtggcctggggagttagacaagcctgcagcccccggcccagaccatctccaacgcccctgtctccgagtatcatgaaccaagccatgctctttttgtatgaacacacgctacgagaacgtgccactaatcgggagagcctcccctccgcctacgtactctcccagcatgagagccacctacctgtctgtggcggatgagcacctgaggcactacgggaatcagtttccagcctaacagactttcgggggttactgcctcctttttccgttctggtttttaattagtgcaaatacaagctgcgtttctttaatagaaaccaaaggcatctggagcccgagaggcctcctgctgtggcagaggagcagctgggattcccgaccaaagccccagggggtgcagaagactcaccacgcgggccagcctctctcttttgccctgctctccacaccagaaatgcccccaagtgcttggctgcctcagaggtaccatccctgagctggctgcctggcctgctacccctacgcctcgcccttgccaggaggggaagtggcaagtgaagaagggggccagggtcatgcaccaccatcaagagagcttgtgggtctctctgggcccacaacgatgactctgccttttggtaagcccaagccaagaagcccagacgacccctctgtcctagttccctgtcctcggtcccgtgcaggtaacatgagaaggtttgatcaggagangctatttaagaagttcgcacccctgttgacaccagatcagcccaaatcagagttcccaggccagacaggctcttcctgggccacagagggaggcatcaggaaagctctgcagtggggggctggtggctccggggctgggggatcacaggctggtgaaccccggtgggaacagaggtgaaagcctgccacattccgcctgtctccctaaccctccattgcctggcctctattccagaatcaatgctgcagaatgtgttagctgcagataggcatggtctcaggtatgaccagacactttgaaacgactttaggtctttcttttctccagtgttttaaacatgttgattatccaaagaattgaaactcctagcacatccagtttttacaacagatttgcagctcattccttacgctggttaggtcactacttttgcagattttgctggcactgatctggagatctgcagatctggaggagacgggaaggagtcgattcttaaataaggatcagtgaggcatcctgtcccaagctactgtttggtggggatctgggttcatctcacccacagagggaggatctttaagaggagaaaaaagccaagagggaaagccagagttccctgttctaggggactagccaaatgcctacatcagctgtcccctccctgttgtctccaagtaagtttgccagaaaaggttttagcaaagtgctacaactgtgtctttataggaggataggcctctgccctgccccacccccaccacctgtccccacccagtgtcccaggccacaggagcttattggccaggagggaataatgtcccccaatactgcctgttgagggaccagagttggggtctttggtgcttccaacctcctgccaacctggagttcacaacaccagagccccacgccctcgcacactgaagcaggggcgtgcggtgactcggtgcttctgttttggaagacccacctgtcatcaaaacatggacagcagggtgttctcagctcccagcgacgcctccacaacagattggggccacagggcagccgggactccctgtctcacctacattaccccatgcatnccgtatgccataaactcactttggtatatccgcgtcacatgcagagaggaactctgcgacgtcaaagtgttgcttcttaaagtttcattattggcaactagagggttgtttttaatgcatggaaactaaacagattcctcggggagttcctgaaggaaccaggtgggcaaacctttgcttatatacatgcggcctcacctggaagagaaataaaccacttgtact

SEQ ID NO: 409 - DNA, 2368 bp, Homo sapiens
  misc_feature 872,1166,1190: n = a,c,t, or g
ctcattggctctgctgcagccctgaccaacgctccaataggccgggatccagccatacttcaatggatcccaggggtatcttgaaggcatttcccaagcggcagaaaattcatgctgatgcatcatcaaaagtacttgcaaagattcctaggagggaagagggagaagaagcagaagagtggctgagctcccttcgggcccatgttgtgcgcactggcattggacgagcccgggcagaactctttgagaagcagattgttcagcatggcggccagctatgccctgcccagggcccaggtgtcactcacattgtggtggatgaaggcatggactatgagcgagccctccgccttctcagactaccccagctgcccccgggtgctcagctggtgaagtcagcctggctgagcttgtgccttcaggagaggaggctggtggatgtagctggattcagcatcttcatccccagtaggtacttggaccatccacagcccagcaaggcagagcaggatgcttctattcctcctggcacccatgaggccctgcttcagacagccctttctcctcctcctcctcccaccaggcctgtgtctcctccccaaaaggcaaaagaggcaccaaacacccaagcccagcccatctctgatgatgaagccagtgatggggaagaaacccaggttagtgcagctgatctggaagccctcatcagtggccactaccccacctcccttgagggagattgtgagcctagcccagcccctgctgtcctggataagtgggtctgtgcacagccctcaagccagaaggcgaccaatcacaaccttcatatcacagagaagctggaagttctggccaaagcctacagtgttcanggagacaagtggagggccctgggctatgccaaggccatcaatgccctcaagagcttccataagcctgtcactcgtaccaggaggcctgcagtatcctgggaatgggaagcggatggctgagaaaatcatagagatcctggagaagcgggcatttgcggaagctggaccatatcagtgagagcgtgcctgtcttggagctcttctccaacatcttggggagctgggaccaagactgcccagatgtggtaccaacagggcttccgaagtctggaagacatccgcagcaggcctccntgacaacccagcaggccatcggcntgaagcattacagtgacttcctggaacgtatgcccagggaggaggctacagagattgagcagacagtccagaaagcagcccaggcctttaactctgggctgctgtgtgtggcatgtggttcataccgacggggaaaggcgacctgtggtgatgtcgatgtgctcatcactcacccagatggccggtcccaccggggtatcttcagccgcctccttgacagtcttcgccagaaagggttccttcacaagatgactttgttgagccaagaggaagaatggtcagcaaccagaagtacttgggggtgtgccgggttcccagggccagggcgccggcacgggcggcttggacatcatcgtggtgccctatagcgagtttgcttgtgccctgctctactttcaccggctctgcacactttcaaccgctccatgcgagccctggccaaaaccaagggcatgagtctgtcagaacatgccctcagcactgctgtggtccggaacacccatggctgcaaggtggggcctggccgagtgctgcccactcccactgagaaggatgtcttcaggctcttaggcctcccctaccgagaacctgctgagcgggactggtgacccatggctgggggtgctgagcagagccgagttggactggctacccctcctggccacccagtactccctccagcctcagctggctgaacctcgccgctccaaccaccagcttcctcagcgagcagggcccagggctctgggcctgaagcaagagccagcccggctcccagtgtctgcccggctcccagtgtctgcccagccctctcccagacaggagcaggctgccaccccttctacctcaccactgcccctcgaagaattttgcaaatggccccttgccccattttaagcaggagcaggtggctggtttgaagccccaggtatcccccttccctgctatgggaaaggccaagctgctgggtggggacagaagctgcaggggagagggaagcagccgtgctgtcaacatcatccggcaccctctggggtaggagaacagccattccacatgtgttcacctctatccgtcctgcttcctgggcagctggtggtgctgggaatgggtgccccagccttggtgagagacagtgttgggaggcccaggggcccagtaaagtgcatttgacattg

SEQ ID NO: 410 - DNA, 2373 bp, Homo sapiens
gtgatttctccagatttacaaattacagatttaaaaatctttttattaatccttcacctttgcctgatttaagctggggatgttcaaaagaagtctggctaaacatgttaaaaaaggagagcagatatgttcatgacaaacattttgaagttgtgcattctgacttggaaccacagatgaggtccatacttctagactggcttttagaggtatgtgaagtatacacacttcatagggaaacattttatcttgcacaagacttttttgatagatttatgttgacacaaaaggataaataaaaatatgcttcaactcattggaattacctcattattcattgcttccaaacttgaggaaatctatgctcctaaactccaagagtttgcttacgtcactgatggtgcttgcagtgaagaggatatcttaaggatggaactcattatattaaaggctttaaaatgggaactttgtcctgtaacaatcatctcctggctaaatctctttctccaagttgatgctcttaaagatgctcctaaagttcttctacctcagtattctcaggaaacattcattcaaatagctcagcttttagatctgtattctagccattgattcattagagttccagtacagaatactgactgctgctgccttgtgccattttacctccattgaagtggttaaaaaagcctcaagtttggagtgggacagtatttcagaatgtgtagattggatggtaccttttgtcaatgtaagtaaaaagtctagtccagtgaagctgaagacttttaaaaaaattcctatggaagacagacataatatccagacacatacaaactatttggctatgctggaggaagtaaattacataaacaccttcagaaaaaggggacagttgtcacccaatgtgcaatggaggcattatgacaccaccgaagagcactgaaaaaccaccaggaaaacactaaagaagataactaagcaaacaagttggaattcaccaagattgggtagaactggtatcactgaactactaaagttttacagaaagtagtgctgtgattgattgccctagccaattcacaagttacactgccattctgattttaaaacttacaattggcactaaagaatacatttaattatttcctatgttagctgttaaagaaacagcaggacttgtttacaaagatgtcttcattcccaaggttactggatagaagccaaccacagtctataccatagcaatgtttttcctttaatccagtgttactgtgtttatcttgataaactaggaattttgtcactggagttttggactggataagtgctaccttaaagggtatactaagtgatacagtactttgaatctagttgttagattctcaaaattcctacactcttgactagtgcaatttggttcttgaaaattaaatttaaacttgtttacaaaggtttagttttgtaataaggtgactaatttatctatagctgctatagcaagctattataaaacttgaatttctacaaatggtgaaatttaatgttttttaaactagtttatttgccttgccataacacattttttaactaataaggcttagatgaacatggtgttcaacctgtgctctaaacagtgggagtaccaaagaaattataaacaagataaatgctgtggctccttcctaactggggctttcttgacatgtaggttgcttggtaacaacctttttgtatatcacaatgggggtgaaaaacttaagcaccctttcaaactatttatatgaggaagtcactttactactctaagatatccgtaaggaatttttttttttaatttagtgtgactaaggctttatttatgtttgtgaaactgttaaggtcctttctaaattcctccattgtgagataaggacagtgtcaaagtgataaagcttaacacttgacctaaacttctattttcttaaggaagaagagtattaaatatatactgactcctagaaatctatttattaaaaaaagacatgaaaacttgctgtacataggctagctatttctaaatattttaaattagcttttctaaaaaaaaaatccagcctcataaagtagattagaaaactagattgctagtttattttgttatcagatatgtgaatctcttctccctttgaagaaactatacatttattgttacggtatgaagtcttctgtatagtttgtttttaaactaatatttgtttcagtattttgtctgaaaagaaaacaccactaattgtgtacatatgtattatataaacttaaccttttaatactgtttatttttagcccattgtttaaaaaataaaagttaaaaaaatttaactgcttaaaagt

SEQ ID NO: 411 - DNA, 2334 bp, Homo sapiens
cgtgcacagcagagacaggcaggtgccccaggtggtagcagtggcagtggtgggtctccagagctcagcgccctgcgactgtcagaacaactgcgagagaaggaggagcagatcctggcgctggaggccgacatgaccaagtgggagcagaagtatttggaggaacgtgccatgaggcagtttgccatggatgcggctgccacggctgctgctcagcgtgacaccactctcatccgacattccccccagccctcacccagcagcagcttcaatgagggtctgctcactggtggccacaggcatcaggagatggaaagcaggttaaaggtgctccatgcccagatcctggagaaggatgcagtgatcaaggtccttcagcagcgctccaggagagaccctggcaaggccatccagggctccctgcggcctgccaagtcggtgccatctgttttcgcggctgcggcagcaggaacccagggctggcaagggctctcttctagtgagcgacaaacagcagacgcccctgctcggctgactacagacagagcacccacagaggagccagtggtcacagctccccctgctgcccatgccaaacacgggagcagagatgggagcacccagactgacggccccccagacagcacctccacctgcctgccaccggagcctgacagccttctggggtgcagcagtagccagagagcagcctctctggactctgtagctacatccagagtccaggacttgtcagacatggtggagatactgatctgaaggaggtggtgcttcaggactctgagccattctctcccctcctctgccctgtgccactctcagccatttcagcagccccgtcaaccgctgctccgtccctttccccagccagacactcattcccattgaccatctggtcccaggagctcaggaggaggaccccaggggagaggagagctgtgagagcaccggcacccccagaagactctgcttcttagcccacattcctccgggccttatggagaatgaggattcagccttgacttcttgcccaaggcctgctactggggtagcaactgacagctcagaaaggagctgagctccctctgccctgccagttgtcagtcaggcagggagggagtggctgtgttggtttggggaactaatttccaaggacggctgcccgtggacaccaggtggactggttcactaatcaagtcagccatattgttctctggctaagtttggttccagccaacgtcatctgctcttcagttcctcactgccttcttgggatactaagacttgaattttttggggactattaagggtgttagtcttggagaagacacagcctcaccttctcacttgctgtgggtgaggggccatttaagtggactgggagacagtgcgcagtttgtatataattccctttcttgtggaacagaagactgaggcctgcaggttccgatgtgtctccatgggctgtgctcccctcttcctactgtcagtttctgaaacttctgactggcctcccagttatgcctcctcctcaagttcctggcccgtggatgttaaagctgctcgattcccaggatctcggctgccttttcctctatcttgagccctataaatgcccacgggacccccaccaccagcctcttgaagtggctccacagctcctgtccctggaacatcctgtcagtttggtcataaaccctgagccagatgaaatgagccaccgtgaacagacatctgccatgcccccaggtgggcttcggtggccctacccggtaccagttctctctgagaaactggagatgtcttgttagcataagtgtcttcattcccacctggagggtttgggagaggagcaaagcagttgaaaactagttaatgagctacaagagtcaaatagtcctctgaatggagcccccatcacaaaacagtgcccaggaggctggctcctcaagctacccatgcccagcgccctaaagcaggaccagatgctttggaattggggtgaaacacccacatggcagcctgctagcagcagtgactttgacttctggtcttaaagagtccctcacttcagccccaggagctattggtgggttttagcagttttgtctttaccgtttttagttctccttgattctttgttttcttcctttatcgtttttaggtttggtatgtgttgttttatttccatggttcctcaagtttcctttttaaacatttgcatttgctggacaattgcaattttttttaaaaaattcccctacccctgtttaaagctgaaaaatacatttggttcatgtgcattgtttacaaagc

SEQ ID NO: 412 - DNA, 3100 bp, Homo sapiens
atcccagcctatgcaatgaaaaaaataattgaaaactagtttgggagaaagttgatgatggagttttacttatacttcaatctgaggacagtacagtaagtacatttgggaacattgtcacttataattgaagtgagcttactagttagagagttcgtcagactggagggaagtaaaacttctataagggtcaaatgaataaacaaatttgctttatcaagctgcttatttatacatccatgtgttttcttatgatgagtcagtcccatgcaccctagtgtaatctagttgccatttgcggtatatagttgtcacgtattactgccagccagctggcagctgcattgccctactcattagtgattaagatggacaaaagtatataacattcttatttaatccacagtgatttttaagtaactataaacaagagttcttgaaacttgaaacagaaagaaaatagtacttacttttgatatgtcacacttgcaacttgtgcctggaattgagttcatcttccatctttagctaacgtggtctgtggccagagccacacttcctcgctcttggacttgattcccataactgaaaaagggaaggtgttgcctcaactagggatggcaagtgtgtactgcttctctttcaacttgcatctatgataaatgaagaactcttcccctcttagcacttgacaccaattgccttgtggcctggaaccttttgttgtcatacttcagcaaatctcaaaagaagaaaataatattaacaagaatagctatggctaacatttgttgagctttttctgtgtgtcaggctttatgctaagcaccttatgtgtgatactttaagctctatgtaattgtaaacgttttcaattaaggggcgggaataatcaaaggaggatagattttcacgttcaaactgtgagatggggcattgaaattaattgaaataaattaaggaaatggccagaagtgtaaaagaaaacaaaataagagtcatttgttcatttccaagacctagcctatacctagtttggtagaacatcaccaattcctttttgattgggtaaattaagggtgaagaaacttgctgtattaggttcttcccctggagactggcctacatccaaagctggcttctgtttcttgatattcaagctggggctgaaagattaatccaagattgagtccagctcagggattcaacctctttcagtactattggatttaatatctgctgacctgttaatcattttattctatagttattcacttgcttctctcagataggaatcttttaattcctaaaacatggcccaattgattattcataggttgcattttttccaatacaaaacctttagctacaaaccatacttctttcaactgttaaataaaaagatgtttcagaaagcactttctatcagtattcatttatcattatttaacaataaagcttaactaggccttgagtatatatcaagttgaagagcagctggtaaagctatgatcacttagtggcatgctcacgggtactaatagggatattatgcctgcattaggactataccctgcctgaaagaatataggtcagttatttaaatgatttacacagagtttgtccctttaataccttgcaaagagtcaggcagagatagtattagtgagttctggcagatgggatacaaatttattacgacaagtcaattttctttttcgtttctaagactactatataataaatgggcctccacagtatattaaattaatggactttatttttcatgtgaaagaagaagaaaaatcttatgaagtgttaccctagaattccaggatagtctttgagtttctggctcataatgtagcttctgaaaagcaattataactttcatcttaaacttctttcaatgacaagtctcgctagagggactgtcactggagtctttctttagagaatgtcttttcttctcaggggaaatgatactcagcagcattcaaaacagttctaggcaaattcagctatggaaattttatccagccccgacttgcaatgattgcatccatatatgtcaatgacattcccttccattgagccttcccctacttcttgtgtttcccacattacataaacacaaatacattttgctattatccatctcatgactgttgatacccagatatagagagattacatttttagttaagatatttcctcgaaggctggtcgagtccaaaactggcttcccatttcttgatagtcaagttgaagcacagagattaatccatctgctaatatggccctacttgtgttggagtcttcgtcaacagacaccatacctggtgtgtctgttcatgacctgcttgcctcatcatagcccacactgtcaagccaatgtgccacacagtgtagtcacaaggattgctgtgacagtgtctgttcacctccatttattcccagcaaccaaggcagacccttgggctgtactttgtgtcagtctgattatcttagtggctacagacgtggagcagagagtgaaatttttcaaatgttgattgagaaagaaccacttagtgcagtcagacataagtgcgcagataagaaattcccagacagtgggagcacagcacattctgtggttattactattattctctaatcagtatgattctctgggcacacttatagaagttcattctttagtggaatttcaagaagaaaaatattttaaaaagacaacagctctatcttctctgtataaagaaaattcattgacaaaggttctatacaccaatgttactgaaaagccattataggcccaggtgcagtcgctcactcctgtaatctcagcactttgggaggtcgaggtgggtctatcacctgaggtcaggagttagagaccagcctacccaacctggtgaatccccgtctctactaaaaatacaaaaacactagcctggcttggtggtgcacacctgtagtcccagctactcaggaggctggggcaggagaattgcttgaacctgggaggcagaggtcgcagtgagccaagatcatgccactttactccagcctgggcaacagagagggactatgtctc

SEQ ID NO: 413 - DNA, 1121 bp, Homo sapiens
gttacttcttttattccatttgcttcaaatggtatcacacctctgaatattgttccttaaaatttattagttacatataggcttatgtatatgtgtagtcattatatatgttcttatagggaagagattttatcatttttgttcatcactaaacccacaagttcaagaaaaatactgatagagggtagatccacaaacattggtggaaatgtaaatggttgccaaaaatgaaaaaggaacacaatgcatacaggaggtattccaaatttttaagtgtgtcttggaagtttgtatgagatttcacagaggtaacaccccaaaaaaattttacttctatattatgacttcttttgcatctactttttccaaaatgttatttttttctaacagagttctaaacattgaaaatcatttaacacattgcattcagtatttctgatcatttttatctaaccagttgctaggatcagtttctaaaaaacagcatgagagagaaaacttgttcaaagtaccctcctaaaattattaaggtcttctaaatttatgtgacttattctatcaggtaaatattcttattatcccagatagtgttggcaaagctaatactgcacattctgtctgtacagtttcgaaatttataaaactaaggtttcatttctaatactctcccctgccataacaagatgggcattttccgctgctctttaactcttatagtgctaaacttgtactttttgcagcagtgatcagtgagggttttgaatatctctaaaaataaatggctttcttccctgtgctacccagtacatcatacaatactaggcgtatatattttattgaagtattgtttttatgagcttgtttttccaaaagggaataaaatatctacaaagcgttagtgataacatctgagaagtttctgctaactctgaaaatgccgtaactatttacacacaatgttaattttctcctattttagagcctgaggttaatacacctcattcttgtcttacagaatttctataacttgaatgtttatgtctcttctttgagcctctttctctcttttatgtataagttctgagatatgaatagaatgtgaaattaaataattttatttc

SEQ ID NO: 414 - DNA, 2725 bp, Homo sapiens
gaagaaaaaggggtgctcgggagcagcccccggctacctcccctggaggcacagagggcgggggccttggcgaatggctttcttgctggccacttgcggagtgagtagaccccgagggtctgggagaggggccggcccctacccctgagtccccggggtcccggccgccaggccggagcgcgaatgtcgtgctcaccctgcctccttcccgccgccccctgggggtttggattcaggatttgttcctagtgtccaagattttgataagaaacttacagaagctgatgcttacctacaaatcttgattgaacaattaaagctttttgatgacaagcttcaaaactgcaaagaagatgaacagagaaagaaaattgaaactctcaaagagacaacaaatagcatggtagaatcaattaaacactgcattgtgttgctgcagattgccaaagaccagagtaatgcggagaagcacgcagatggaatgataagtactattaatcccgtagatgcaatatatcaacctagtcctttggaacctgtgatcagcacaatgccttcccagactgtgttacctccagaacctgttcagttgtgtaagtcagagcagcgtccatcttccctaccagttggacctgtgttggctaccttgggacatcatcagactcctacaccaaatagtacaggcagtggccattcaccaccgagtagcagtctcacttctccaagccacgtgaacttgtctccaaatacagtcccagagttctcttactccagcagtgaagatgaattttatgatgctgatgaattccatcaaagtggctcatccccaaagcgcttaatagattcttctggatctgcctcagtcctgacacacagcagctcgggaaatagtctaaaacgcccagataccacagaatcacttaattcttccttgtccaatggaacaagtgatgctgacctgtttgattcacatgatgacagagatgatgatgcggaggcagggtctgtggaggagcacaagagcgttatcatgcatctcttgtcgcaggttagacttggaatggatcttactaaggtagttcttccaacgtttattcttgaaagaagatctcttttagaaatgtatgcagacttttttgcacatccggacctgtttgtgagcattagtgaccagaaggatcccaaggatcgaatggttcaggttgtgaaatggtacctctcagcctttcatgcgggaaggaaaggatcagttgccaaaaagccatacaatcccattttgggcgagatttttcagtgtcattggacattaccaaatgatactgaagagaacacagaactagtttcagaaggaccagttccctgggtttccaaaaacagtgtaacatttgtggctgagcaggtttcccatcatccacccatttcagccttttatgctgagtgttttaacaagaagatacaattcaatgctcatatctggaccaaatcaaaattccttgggatgtcaattggggtgcacaacatagggcagggctgtgtctcatgtctagactatgatgaacattacattctcacattccccaatggctatggaaggtctatcctcacagtgccctgggtggaattaggaggagaatgcaatattaattgttccaaaacaggctatagtgcaaatatcatcttccacactaaacccttctatgggggcaagaagcacagaattactgccgagattttttctccaaatgacaagaagtctttttgctcaattgaaggggaatggaatggtgtgatgtatgcaaaatatgcaacaggggaaaatacagtctttgtagataccaagaagttgcctataatcaagaagaaagtgaggaagttggaagatcagaacgagtatgaatcccgcagcctttggaaggatgtcactttcaacttaaaaatcagagacattgatgcagcaactgaagcaaagcacaggcttgaagaaagacaaagagcagaagcccgagaaaggaaggagaaggaaattcagtgggagacaaggttatttcatgaagatggagaatgctgggtttatgatgaaccattactgaaacgtcttggtgctgccaagcattaggttggaagatgcaaagtttatacctgatgatcagggcagtaggcataattcagcaacaaacaatcttcctttgggagaaacctgttcattccaatcttctaattacagtggttcctatctcagggatactggactttctgacgcagatgaacaattaaggggaaaagcttcccttttccctctgtggcagttacgattttgacttcagtcctgagaaaaacttcaggttttgaaaatcagatgatgtcttctctcttttccaaacaccacacgttgaaagcatttataaatccaagtctgaaactctgcgctctagtactgctgttaagatacacaacttgtttcttagttcatataatctcgggatacacacacacacacacatatatatacacacacatacgtatacacacacatacatatatataaatatacctgatgccagatttttttcataaatattcggcccactgtaaatatgggttcctttgagttgttttagaaaattagcgcaatgtattaaaatcaagtgttaggaaatttcatggtcttacctacaataacttttattttggaattgaactattattaaattgtatctaatcctgg

SEQ ID NO: 415 - DNA, 1036 bp, Homo sapiens
  misc_feature 203,530,820: n = a,c,t, or g
cttgtatatttcctacccagtctgccggctgatttgctttctcggttaagtcgttgctgtattatgggaagactcagttcaagtttggctgccatgcttatcgggatactgcacatgagatcatcattttctgggtggaagtattcagctaaagactggttgatgagtgatgtagactatttcagcttcttattttccacacntacagggttttcgaaagaagagttgacttggcttcagagccttcgaggagttcctcatgtcatccagacacagctttcccctgtgcttctctaccttacagatttggatcaatttttacaccactgggatgtaacagaggcagtttttcacagtttattggttattcctgcccgaagtcagaactttgacatcttgcaaagtgccatcagtaagcattttgttgggttgactgtaatttcctgacagcacggctggctgtgtttttggtgttatctgtaagctcctggatcatacttgtgtagttagtgagactctactgccaattnctggcttcttgttgctacagtcttctttattttctgctcactatagagaaaggggaagcagaacatctaagaaagaggacaagctgtggggggtctgtgtctccatcctggctctcttgcctcgagtcctcaggttgatgctgcagagcctgcgggtgaacagagttgggcctgaggagctgcctgttgtgggccagctgcttcaactgctgcttcagcatgcacccctcagaactcatatgttgaccaatgcgatcttggtgcagcagatcatcaagaatatcacgacnttgaagagtggaagtgttcaggaacagtggctcacagacttacattactgcttcaacgtgtatatcactgggcatccccaagggcccagtgcactggctacagtgtattgaagaggccatagtacctcctgtttgaagttgtttattcacatctatcttatttgaagaaaaagactgatgtaatagatctttgtcattaaagctgaacttttaaag

SEQ ID NO: 416 - DNA, 2599 bp, Homo sapiens
gcactgtccctcggagtccgagacttccacctgggtcgtgtccaaggccccggcgactccccggactcggggtgccgggccaacctccccgccgaggcccacccgccgtcgctatggcgtgcagtttgcagaagctgtttgctgtggaagaggagtttgaagatgaggttttcttgtctgctgtggaggatgcagagaaccggtttactggctcactgcctgtgaatgctgggcgcctgagacctgtctcttctaggccacaggagactgtgcaggcacagtcctccaggctgctgctgttacaccccactgctccctcagaggctttgggcctgccagacttggacctctgcctccctgcctccagcacgcccagtgctgacagccgtccatcatgcataggagcagctcccctaaggcctgtctctacttccagcagctggattggcaatcagagaagagtgacagtgacagaagtgctcagagagacagcaagacctcagtcctcagccttacaccccctactcacctttgagagccaacagcagcaagttggtggctttgaggggcctgaacaagacgaatttgataaagtcctggcaagcatggagttggaggagcctggcatggagctggaatgtggagtcagcagtgaggccataccaatcctgcctgcccagcagcgggagggttcagtattggctaaaaaagcccgggtagttgatctgagtggatcttgccagaaggggcctgtgcctgccatccacaaagcgggtatcatgtccgcccaggatgagtctctagatcctgtcatccaatgtaggactccacgaccccccttgagacctggtgctgtgggtcaccttcctgttccaactgccttaacagttcccactcagcaactccactgggaagtctgtccgcaacgctcccctgttcaagcacttcagcctctccaagctgctagagggaccattcagagcagccctcaaaatcgtttcccttgtcagccattccagtctccaagttcctggttaagtggcaaagctcatttacccagacctcgaactcccaactcaagctgttctactccctcaaggactagctctggattatttcctcggatacccttacaaccgcaagctccagtgtcttccattgggtctcctgttggtaccccaaaaggtccccagggagctctgcagacacccatagtcaccaaccacctggtgcagctagtcactgctgccagccggacaccccagcagcccacccatccctccacccgagccaaaactcgccgtttccctggcccagctgggatcctgcctcaccagcagagtgggagaagtctggaggacatcatggtttccgcgccccaaactccaacccatggtgctctggctaaattccagacagagattgttgctagttcccaggcatctgtggaggaggattttgggcgagggccctggctgaccatgaaatccacgctaggcctggatgagagagaccctagctgcttcctctgtacctacagcattgtcatggtgctgcgcaaggcagccctgaagcagcttcctaggaacaaggtccccaacatggcggtgatgatcaagtccctgactcggagcacaatggacgccagtgtggttttcaaggaccccacgggagagatgcaggggacggtgcacaggttgctgctggagacgtgccagaatgagctgaagcctggctcagtgctgctgctgaagcagattggagtgttttctccttcacttcgaaatcactacctcaacgtgacacccaacaacctggtccatatttacagcccggattctggggatgggagcttcctcaagccatctcagcccttccccaaggattcagggagcttccagcatgatgtggctgcaaagcccgaggaaggcttcagaacagcacagaacctagaggcagaggcgtcccctgaggaagaactcccagaagcagatgacctggatggactcctgagtgagcttcctgaagacttcttctgtgggaccagtagttgagactgccccaacgcaggacaacccaccatgagcaggcagctctgggcatgtgtctggtcacatccaagggggagaagaaggccagcatgattggagagtggacacagccggggggcttctgtggttgctcccaccctgggtgttttccctgagagccccctcatctctgcgctgccctcactttgggccttcctttgccgttggcaccagaatccggccggagactggctctccagccaacaagaaaggcctgtcaccctcgccttgggtgtccctctcctgcctcagcttaattttagaggatattgggcctggttttcttgtcccttcataccctagtccctggacagcgtgaggagatgaaaggagccacaccacaacaatggcggcctgcccctccacacaggggagaagcacgctcaggcttcctctgctttgtctcttcagacctgtggttgctctgctcatccatgcccaaggttcccaggtgcaggacagaggtgtggcctattgtaccttgttctgaaataaagcatctcctgctt

SEQ ID NO: 417 - DNA, 1283 bp, Homo sapiens
gaagttgtaaatcgactaactacagctgttgatctacctcctgaatttattcacctttatatatcaaattgcatctctacttgtgaacagattaaggataaatatatgcaggtaatataaatttttgtaaattttataaatggctgccaggaaaatgagcagactaacatttttttttttcctttttcagaatcggttggtgcgtcttgtgtgtgtgtttctccaatccttgatccgtaacaaaattattaatgtacaggatttgtttatagaagtgcaggcattctgtattgaattcagtaggatacgagaagctgctggtcttttccggttgttgaagacattggatactggggaaacaccttctgagaccaaaatgtcaaaataatacctcatcagaaccatcccatccattcactgttcagctgtactgtgatttagtttttacaccgttaaaaccctgagtggattgcttggtttaatgcatataaacagtactttatctacttaaagcaaagttttgctttcttgaatgactttttctgtgagatgaatttttgataagaactagggaaaacatgtcttttaggtgtcttgctgatgactatccataggaggaatggctatcccaaaaaaagttccgcaaaaaagtagatgagtttcttttttttttaagcactaaagaacaaaatgcatttttcattaatacaggcttctgatgaaccaggaatcctgttttcgtaaagttccaatgttgatgagagtaaattcttaagcatttgtcctagaggtgaaagcagctgaatgtttctgaaccatcaagaggcaaacaaacaggagtttgtttcttgaacctgcttatgcacacagctcttaactcctcatgaggcacacagctcttaactcctgatgaaccaaggatttactcataactttctccttgtcatggaggcttaatagacaacagaataaatgcatttcttgggcctcttataaacttgggaattcttagaaagctgcttctattaccaggctgtaatagctggtatagttttttttttttctcttaagatgttctgttattagtctgagacagccatttttttgttttaaggaaaaatatcagtcagtgctccgggaggtaatttcctgtggggtctgcaccctcctgtctgggtggtggatgtgggtttgagaagtaggagagcagggtggtaccgtgtgggctcttaccctttatgtgattttggacaacagtgccttccattaaagttctttttatc

SEQ ID NO: 418 - DNA, 2446 bp, Homo sapiens
ccacccccacccccaccccccacaccttcccaaggcagcatcccagtgcagatagagtgggaaaggtcccagaagggggctcactcacctctaggcccagagaggctttctcctcactttatacactgcaaaaacagaagaattgtgtcaataacaccctctgtagtggagaaacttaaaaagctggttaggaagctctcgtgtatatttagagacaattacaagaaagctggacttgccgctgtggtctcaggagaaatgagtgttcttgatgacaggcaaagggacatcttagttgtccagaagcggcactcttccctggaagccgccatgttaataggattactagcctggctccagacagtgcctgctcatggctgccagttcttaccgatcacatctgtcactgccaccgtatatcatctgccagtgcatcagcttaaggggaggtcacgagtgcaaaagaacctgacccttgacaatgagggagaagggacatggaccacctgtctggaattctggaatcactggcagggtggaggctgggctggggagttagccgcggtgtgcgtgaatggctctgtctcagcaagtctctctccatcaaaccccaggtctgccccataagcaagatctttaacagatggatgtctccatgagaaaacccaaggcgagaagcccagagccatggcggggttgcttgacgtcctcatggagtcactctgccccacatgctcaaatcttccctctggccccacatccctaggagggcctgacccctgtaaagatacaggaggcagctccctggcctccaaatggcccatggagatgtcagtcgggagacagggttctgtgtttgctgcggtgaagggaggagaaggcaggaggaaaaaggatggcttctagccctgaagaggactccagcatcccaggcaccgggtgcttctggctgcagttttccctatggaggcccctcagcctccagccctaacataaatgtcggttaaattcagttttcaagcctctctcccttttcagtgtcagagcagtagatggtccagggcattggaggcctcgaccactctgcattgcagattacagtgacttcctcggggttgccccatcttggtctcctgtggtttcttcatcagctttttttttaccagcatctctcaaataacaatgaagatagatatgcccattagtgtctgattaaggagcaaaggctggatttctggccacagcgagctgcactctccctcctgcctcagccggggtccgtcttagcagtttggaaaggggaaaaagatgccggtcctcactgcttaagttttgtgtccaggtgccactagacttgcatgcacactaactccttacaatcaccacacagcatcatcgccccagtgcacagatgaggaaccagaggctcagaggagtgaagttgccttcctgaggtcacacagcatgaaagtgatgagctaggatttgaatctgggaagttgggctctagagccagactgtactgccttctgccacactgtactgccttctgtgactgggtggcacctccagggcacatttacacaaggccctgaatctgcagaggctgtttctcaagatgcccgtcatggtgtggcctgggccagctctggcttccacaggtccctgactgtcctcagagtggaacatgctcaacctcccgcccactgctctctctctgcccagatttcaggggtgccggtccccaaggcctgcccccttctttaagactgaactcaagtctccttggaaggccccggtgaagctcccagagactggttttcttgggatgcaggcagaaggggaccctccctggccaacacccaggagcccagcagaagcacccacacgtagaaagaggctcactacagccagaagtgcagagtcagagtcctgggaccatcttgttctgcaaggtgaccccaggctccccaggacaggggagagtgatcgtcctcattcagactctagctggggcctctgtactggcttctccctgggtggggttgcctgttacatagctgtgcctcagagaaagggtcctgcattttctggaatgttctctgtgcttacccctctgtgtgcccctccattgctcctctacaagcaattaggtgattcaaaagagcaacttaggctgggtgcagtgactcacacccgtaatcccggcactttgggaggccgaggcgggcagggacaggagttcaagaccagcctggccaacatggtgaaaccctgtctctacaaaaaatacaaaaattaaccagacattgtggcatgtgcctgtaatcccagctactcaggaggctgacacaggagaattgcttgaaccaggaggcggaggctgcagtgagctgagattgtgccactgcactccagcctgggcaacagaacgagactctgtctc

SEQ ID NO: 419 - DNA, 1923 bp, Homo sapiens
cccgcgcagtccgcgcagccctcatcgcaactgggcccgcgcgcaggccttacataggaagtccttctaaagagctgcctgccagctgcccttccccagatcccgaatatcctcctggccaggtggagcagagaacagttcctcagctggtcatgctgagctcataccctgatggctgctccatgaggtcaagactgggtctcctccctcctcccccttcaccaatgcctggtctcacggggctagttttgacccccacgctatggcatcatcgacctccctcccagctcctggctctcggcctaagaagcctctaggcaagatggctgactggttcaggcagaccctgctgaagaagcccaagaagaggcccaactccccagaaagcacctccagcgatgcttcacagcctacctcacaggacagcccactacccccaagcctcagctcagtcacgtctcccagcctgccacccacacatgcgagtgacagtggcagtagtcgctggagcaaagactatgacgtctgcgtgtgccacagtgaggaagacctggtggccgcccaggacctggtctcctacttggaaggcagcactgccagcctgcgctgcttcctgcaactccgggatgcaaccccaggcggcgctatagtgtccgagctgtgccaggcactgagcagtagtcactgccgggtgctgctcatcacgccgggcttccttcaggacccctggtgcaagtaccagatgctgcaggccctgaccgaggctccaggggccgagggctgcaccatccccctgctgtcgggcctcagcagagctgcctacccacctgagctccgattcatgtactacgtcgatggcaggggccctgatggtggctttcgtcaagtcaaagaagctgtcatgcgttatctgcagacactcagttgacacttgttatatcatgggaccccggaaattggagtgaagctagaaacagaaaacccatgcagggcctcggattcccacaaatgtgacaagaggtatagggagtgagtcacagcgctttgctcgtgaccctgggatcagagcacccatcaggcttccattactgtgggctccctaagaagaccatggagagcttggggactcccccaggaaggccgtgaagctggggattccccctaggaaagccatgaggaagctggggactccccaagaaggccatgaggaagccagaaattggaggtggtaggaagtggtactgatcaatgatggccagcaggactcatcttctgcctaactggacaggaagcctggcacccacttctgtcttccctggaactgggcactggcgtacactggtatccctcctaaagaagtgactcacctgacttgatcagcaagaagcctagattgcaggcctcaccatggatggtcttcctagttgcctggggaaaccctggaatgggcatcaggagaaagcaccaagaatccagtccttcacactcacactactctgttcctcttcccagagacatcgattcacttcaaagagctgtagggaagatgcagtcagcactgcactgtattttttatttattgcctaggtgccattaaagacacaaacctagaagcctagaggccattctgaatatgggggtggggtggtggagggagcaagtgaagagatgggaatccagggctcagggttcaatgccttcacctgagatcacaagcccatggatgctgtgacatctgggagcttcatcagtggtctggctaaagctgatactttcacagtcaccatcttcacctttggactgggaagaatcaccatttttcttctggcagatgactgtattccttataggacaggcaaggtttcattcatctgttctcagtaagtttgttgttgaactgaaatgaatttcattatttcctcc

SEQ ID NO: 420 - DNA, 534 bp, Homo sapiens
ggagacttccaccctggggtcccaaacgccgctaacgcccagacgcatggatgcaccccctaccctgcctccatctatgggagttctttctctcagagtgggggcagtttctggcccaggggtctgagctgcggcagccccagggcagggggccctacctcctcagctctgtgcttggatacagggagcagccaggagactccctagtgcccccaccatggcgggtgtcactcacgcactccccatcccttagggcttcctggcctactgcatccttgtgggagtcagggaggagggcccgttgggtagctggggccaggcttctctccccaccacctgcagatttcttgctgcttccactgatacccttttgactggaatgaactggctgggcttgtcagggggcaccccaaagagggggcactgccaggtagctgggggagtggcatggggcaggggcccagttctcagcagcagacactctgtacagttttttcaatccctgtttttgaataaatattctcagcgaccagg

SEQ ID NO: 421 - DNA, 506 bp, Homo sapiens
gtgccagctggcttaagtacccaaagaaaagaatgcagcagcctaacttagtgttaccatatgttactgaatttgaaactgaccttttttcccaccctacttcacacacctaaaactcttttcttgtcagaccaaagagcgaaaagaaaaaaaagtaaaacactttaccaatctgtcactcaggtacaattttgtggtgagatttttgtctgttctctttgtattgctcttaagagtcctttctcagcatattattctgccattgcctctgtcttccttggggcacctcagctctggatgctacccctgggatatctactgctgttatgtgaatgataggaggtaagtgaccattatagtaagggctctttgtaaaaaaattcaaaaaatttaaaaaggatgtatacattttatagtctggctatcagtttgatatcttgctgtcaagtatgtttctcaatctgtatttatccatcccatcaataaatgttaatggtaaaacactc

SEQ ID NO: 422 - DNA, 1109 bp, Homo sapiens
caaaaacagggtgatctcattagattttgaagatatatgactcctttgggctacatttcatattgatcaatttctaggtatttttcactggcccaaagtattgcattcccttaacagcaagcacaagttctctatatcacttgttttttgttgttgttgttgttgtcgtcgttgttttgagacggagtcttgctcaggtgccccggagtgcagtggtgcaatctcagctcactgcaacctccacctcctgggttcaagcaattctcctgcttcagcctcccgagtagctgggattacaggtgtgtaccaccacgcctggcaatttttttgtatttttagtagagatggggtttcgccgtgttggtcaggctggtctcgaactcctgacctcaggtgatccgcctgcctcggcctcccaaagtgctgggattacaggagtgagccactgtgcctggcctatcccacttggtttttgactgaaggggaagtgtagaaatatattgatttgtgatttctggtgtcacctgtgttaccaaaaatcaaaacaaatcttttttattttttattattattattatttttgagacagagtctcgctctgtcgcccagtgtggagtgcagtggtgtgatcttggctcactgcaaactccgcctcccaggttcaagcgattctcccacctcagcctcctgagttgggtcctacaggcgcacacgaccacgcccagctaattttttgtatttttagtagagttggggtttcaccatgttagccaggatggtctcgatctcctgacctcgtgatccactcacctcagcctcccaaaatcctggggttacagatgtgagctaccactcacggcccaaatcttcttgatcatatgtttaaatatattttttaatatttggagcatgagttgtcacttcttgtttgccttttttataaggaaatgttggagagttacatcattgctaatgtagaaatgttaagtggaaaaatatacagtttggtaaaataaactagattctacatttatttgtgggtttttttcccctcctttctttccacagcacttttgatatcaagcaagtggcttcctttttgagatatt

SEQ ID NO: 423 - DNA, 1468 bp, Homo sapiens
accaaactcctgcgctgggtgaagaaagaggaggaccggctcttcattcgttacccacccaagtactccacaccaccagccacctctacggaccaagctgcccataatggcttgttcactggactctgatagttggagctcccagaccaggcagtgctgggagcaaccacctttgttttttaccttctgtctaccctggaaatgtgtgtgggggtgtgtctgtggccagtcattgtctccctaagcaatggggcaaggtctgagggcccaccgatgagagagatggtggcagccgccaggcgagcaggctgctttccctgcccagtcatgcacctccccctctggggaaatccttaggcctccctctcccttccctctgtctcatctcctccactttggatgatgctctagcctctgtcagggactgtcccctccaaacttgcttccgtggtctggctcctagttgaatctcagccctgagtgtccagatctggccaaggtgtctagggtggcccacgggggtgctggaattggcacttcagggccaggctatgcttgggactggcctgagggtattttaaagaaaaaaactacataaaaggcctaaaagtaagacccacaaggatattcctttgcccttcttgtacttttttcatctttaccctgccagaaatgacccgccctcaatgctggctgctgctaacattaatgagaaggtggccttcagtgtccacctgtggaacccaggacacagcacctgactgcacacagtggctgaaatccagcatttttacataggagatgcacttagcctctaagcctcgttttactcatctgtgaaacagagataagtaaccctctctcatgaactctttgatgaggatttgtaaacgaaaacagactcgaactattgtgtaccaccacatagcacatgcacgtctgtcccagactttgacaacctgcacaagacaagcagcctaaagcaggagagacctccctagggttttgtgtgtgtgcacactaccctcactccccaactggccattaccctagttctgcccttgtttgtggagttacagcctcaaggttgtagcatgtgtgctggcaatcagggccgcagtgtgttctgcgcctgcccagagctgactcctgatttaaccgctggcgtaaccgcgggttgcacgcatgcgtgctgaaaagcctttcaccctcacgtggtttcttttttaaccagtcatcaagcgaggtcgcgcgcaggccctgcgttggaaaatggcggggaagctgaaacctctgaatgtggaggcgccagaagctgctgaggaggctgaaggtagtgagggcaagtgggctgcactcctttctctccaaccagggcagaaaggagggaggattcgtcccattacaataatgaaataatgatattctaatttttttaaataaaatgttaagccttttgttattgaag

SEQ ID NO: 424 - DNA, 677 bp, Homo sapiens
cccacgcgtccggtgaatttatctgcagcttaaattcaagtgaaacttcattctcatgcaagcatatcagacttattctggaacctctagaactggacttgaattccctgcaggtgccagactggtgggtgccctccctgcctgccattaaacttttcttacagccactgtccctttatctgtgacttctgagtcatccgacggatccattagttgttcaatgagaagttcacagatcttgtatcaggatataaactgatcttatgttgaaggatgcaccctcccctaatgaatgtattctcttaatattccgatgctgtatttgtgcatcagttggagactgtccacatccgacatttcaccgacacctcaaggacacttctacttatgagcagttcatcattctggggcttctccttatattaatactctttccattgagtcctgccaaatcctttattgggttttctttttcctttgcatctgtcactttgtccaaatgagcatgaataaacaaaagtgtaaatgagctgatactatttttgtggtcagctgaggatgctgccaagaacaccactgtatatctgtggcttgggaatgttaagaggaacgtgcaggcccttccattgatgatattcccttctcaacatttttaaacaagcacaaatgatatttgt

SEQ ID NO: 425 - DNA, 1654 bp, Homo sapiens
ctgtgagttacgggcaaccagcctcttcagcctcacacccattcccctgagagcaagaagcctgtgtggtctgggccagtctctgccatgtcctgagtctgcttcagtctggagctgtttgtggggcgagtgccatgtggacagtggtggatgatgtgtgtgcttcaggctgctccctgacccctctgacctttccacgagtgtcacatgggaatgtgtggggcgcaggggcgggtgcggagagagcacctttttgcttttcgagctcttgaccacctccaatgtgtaggtccctccaggctggggcttgggactgcttatgatttggggatcaagcctccatgtctgttcttgttgcctgtccagatgccaaaactctgtgttgctgcagggtttgaacttttggaaaccaattaaaatgtgcctttggtgggcggggtcaagagcccctggatgtcgacctctcccgctgtgtggtgtccccctcccacctgttgaatacatagggatggctctctcagggccctgggaatgggaatggacagcgctgctgtgggctgttcccctcccctaaagttaatctcttggtctggccaagttgctgctccctcaaccttcctgctgtcttcccctccctcaaccccaataggaggatcccaggataaacactgctgggcaggcgggcaggcaggcctggggctgccctgctcactctcattgtctggcctcaggacttagccatactagaccagtcagcttgcctggaagagggaggtcccactatgcctttgggagacacctatacttaggaaaaagcctttgttgtcctcccatccatccattaagctgctatctcagcctgtcccttctgccccaggggcttgcctggcttggctgcagtgcactttgaaatgaagtatctgtcctttggcccagcccctggtttgcttgtagaaaacatggtaggcttccccaaggcatctgcagggaactttggcagcttggggcaccctgaattagcaaaaatggggggtgatgaggtgctgaagaaggatacttaacagcttagtgaggaggcaagagctcctctgggaccaccacttcttcaggagagggcctgtgggcttgcttttggaaggcctcaggcagacacgtgccctctgggtgatgtctgtctgctgccaggatggagcagaggagcgccacacatggaggaaagcccctgtaacgttacctaccttaaactccactcatcaaatctgagaaaagtatccactggtccccagggtttcagtcatgcttttgggggtcattgggtattagagaagtaagtatcttttctgagagagggggagtcaccccccctactggggattcctctgggctttattcactcccagccctggccctgacctttgtgggcctccctaatgcccagggcatggatggcttcagaggagtttttgaatcgaagcccagggtccttgttgatgtttcttctcctagccacacttggaggaaagttgcaggtgggttgggcagggagcaggcatggttctgctttgctgtttgtcttcctagttaaggctctttataaagagcttgttcttcatgttttaagcactttatgaagaataaaacattcatgtactgc

SEQ ID NO: 426 - DNA, 1657 bp, Homo sapiens
  misc_feature 1285: n = a,c,t, or g
attatgaggcctcaggtgccttggggtacattgtcatgctataagggatgtatatcataaggtatggtggaagaggggccttatgtgaatgattgccacatactgtttctgttgctgctttttttccgattcctttttgtcattggatttgtttgttttgtcatgtggtgaatggtgttttagttattgtgttgctgccagaatcagaatccagttcttgttcttactgcctatatagttattgtgttgccaccagaatcaagaatccagttcttgttcatactgccttgtagtgagggcagtttaatatctacaaagaagcttttagaagctgaaaaagtcaatgtgattgtgcattctgcttttaagaagctgtttcagctatgaactgtgtatgtgctataagtgtgaggtaccataagttatttaatttttaaaagaggaaactcctgagtgagctgtttaagaaatctgagtgtgatctattgttacgttatttataactaggtaaaatgtctgtcgtgatagatttcttttaacgttcagatactgtggttgggttgtctatatttaatatgcagatttgcctgctggaatcataatccatttttaagtgaatgtaagaaatgaaaactactgcatttgtgtcttttgaaggcaaggatccttggattttaaaggaagagtatgtgctttgaaggcactcagagactagtaatagcatatggtttgaagggaaacccattctctttcaattacaagagagcatcacttagcgtgcagtacttctgttacagcatccgatgtgtcctttattttaaattgtaaccataacagccattaatggctttatttcttgtattgctctcatctgggaaaagtctctacttcttcaaacgtaacataaatctattatgaagcttgtcccctagtatgccattataaagaaaaaattcttcgatggtatgcagtgtatctattctgtttgtaaaagatcatgtcaaaatgttctgcctctataatgataatagatggttttgtctttcaggatatttatccacctactgtcttctttgccttaaagggacacttggccatcatttttaggctcgaacttaacactgttaagaaataactgaaatatgatggtatttacattaattttgaaattcaatggtgggatagaattaggtcaggaaatggaagttgttccaatggtgtgagaactaggagacaagatgattccctttattattaaaaccaagcttcatttttagtttttgtngttaaaatggactggaaagttaagtttttgcagggattgttttgaaataaagagatatgctaactcacagatgaactttgttaagacccctttatttttatataaagtctaatatttgaaaagcgattgttataaagtaaaattctctcttcctattctaatatatatcatatatttcaggcttctatttgaaaacaggtataagagatgatatgatacaaccctatagataatgttttttgcttgattgacttatataatcactgtttcatgattactgcttttggaataataggaagttttgtgaaatgctggccttgtgtatatcttagaatgcaaatttaataaagtgtgtatacatgcataaaattt

SEQ ID NO: 427 - DNA, 562 bp, Homo sapiens
cgataacctgtttccttgctactttgctttggtgtaagcagagttctttctgtaggttttttcaaatgaaaacattgcaagaatatcaaagagagcagtgtttgcgttagtgattataaactgcagcatggtgctgacattgataactgaaagtcaactaatgagaatttgagacttctgaagtacacttagttgctagtgtctcccttttggtgtcactggaaagtttagaaagcatggttttgtttttgctcaggtttctctttctgtgatgcagagactctcagctgttcctcctctatgtctacattatgtctgaaggaaagaatttaacaaaacttgaaatactgctgtttttctacaatgtttgtaaatatttatcttgctgcttttctagttttgtcttctggatttaaaatttggggcggctggggtggaattgcatggtttgggaatgggtagttgagctgctgctcattatggtatgtaacagtgatttgtctgtttaatatgtacaagaactggaaggtcaataaaatgaaagtggttgtcttgactgggt

SEQ ID NO: 428 - DNA, 466 bp, Homo sapiens
gctgtgagaagtatccgcgacgagctatccgggaaagggccgaatgcgatcaaacctaatccgcgagacttgctaaggttctgtgctacaaattgatgtttagataaacttcagtgaaatgactcttcaggaattggtgcataaggctgcctcctgttatatggacagagtagctgtatgttttgatgaatgcaacaaccagcttccagtttactacacctacaagactgtggttaatgctgcttctgaattatcaaattttctgctgttacactgtgactttcaaggaattcgggaaattggtctctactgccaacctgggatagacttaccctcttggattttaggaattctccaagtcccggctgcttatgtacctatcgagccagattcaccaccgtcattatcaactcattttatgaaaaaatgtaatctaaagtatatccttgttgaaaaaaaacaaatt

SEQ ID NO: 429 - DNA, 859 bp, Homo sapiens
ctggagcctccatccgcagtcacacgtgtacagatctggggatttggatgtatgctttttctaacttctctctcagaagcttctacagaaacccttccatctgtagcctcaagggcccacctccaagggaaggcttaggcaatgatcctgtttctaccaacacttgcaccttatcccaggaacctgccctagacctcccagagaccatattttctctccctccatttctacccagacctccaggcctccttctggaatcatagaaccgtagaattggaaggaattttagaggttttctagttggagttgtgtccaacagaattcattaacaccagcctgggcttgtttttcctcctccctctggacttttttcatcttttcctccacctcaaaaaatacttacacacagattcttcttgtacaggcatcaaaaccaactcctctgcccctaaggctgtgtccctgtggtctccagccacccctaccccagtcactcgccccttcctcatctctggaatttggccaggcagtcccagaagactctggagtgacctcctttgcctaaaaagcagacagataggcatgccccaggccctgagtgagcagaggaggactgtagggtgagagggaaagaaaatgaaggtgactttcatggaagtttcatttcttttccccgattgtaccaactgcatgtacttttggcctggctgcaaggagcaatattggtttactctcgtatccttaaaaagttacagaactgtgtcttaagagaattatttatagttactataactgaattgacaaatgtcaacttaactgataaattatatttggtaaaataaagaggacgtttatttag

SEQ ID NO: 430 - DNA, 534 bp, Homo sapiens
tcaaggcaaaagtggaaccttaaagtgatccatagctgtctttgtatgatcaaaagatgcacagctttttattagtcaggaaaaggagaaagtgtttttttctggaagcaaacttaaagacatttcaaaaagatatacagacgatctccgatttaagatcgtttgacttaagatttttcaactctatcatagtacccattgcaaccaacctggttttcacttttggtacatatttggtaaattatatgaggtatccaatactttattatacaagtagatttgtgttagatgattttgcccaacctatagactaatggaagtgttctgagcacatttaagatagactaggctaggctgtggtgttccgtaggttaggtgtattaaatgcattttctacttagaatgttttcaacttacgatgagtttattgggatgtaaccccaccgtaagtcaaggggcattggtattgaacctcataaaacagaatgcctttaggagatgttttcaaaaaagaaacagaaactataccaggac

SEQ ID NO: 431 - DNA, 1038 bp, Homo sapiens
cacaaatagaactttatctaacaaatcactttcaaaaataacaggtcaactgtatttaatttgtttatgtcacttataacttacctatttctgtatcaggtaggaatgttttctgctttaagtaacacaaaagatccaagtggcaatggttcttcaaataggggtttttctcagataacaagaagtctaaaggagctggccactggcattggtttagtgactcagtgatatcaggggctcagattcctttagcctttctgtcatggaaacaagatggccattgcagttcaagccaatgtgtctgtattcaagacaaaaagaaggggaagcagggccttccacatctgatccttttctcataaatgtaaaatcttttctagaaatttagatcagacttgtgttcatctgctagccataaatgtacaacatgatcaccccttgttcccaggaaagtgggaaaatgaagctgtacgcctttccagtctcactaatggaaggtgggaaaggaaaatggggattgggaattaccatggatcagacaaccaacagttttgccaccagttataattagagcagaggtcattttatatttgaatcttttctgtaatgtcttcataaagctcactttattattatttttgtttgtttttgagacgagtctcgctcggttgcccaggctggagtgcagtgacgcaatctcggctcacgcaacctccacctcccaggttcaagtgattctcccacctcagcctcctgagcagctgggactacagacatgcaccaccgcacccagctaatttttttgtgtttttagtagagaccgggtttcaccatgttggtcaggctggtttcaaactcctgacttcaaatgatccgcccacctttgcctcccaaagtgttgggattacaagcatgagccactgtgcctggcacataaagctcactataaaactgcagtcctaagtacttaaaaatttcctcattgttggatatctagttttgttttcagtgctaacctaatataaaaaaatactacac

SEQ ID NO: 432 - DNA, 717 bp, Homo sapiens
gacttggtttcttagctagaaaccagaagactacgggagggaatataaggcagagaactatgagtcttattttattactgtttttcactacctactcccacaatggacaatcaattgaggcaacctacaagaaaacatttacaaccagatggttacaaataaagtagaagggaagatcagaaaacctaagaaatgatcatagctcctggttactgtggacttgatagatttgaggtacctagttcagaactccctagtcaccatctccaagcctgtcaacatcactgcatattggaggagatgactgtggtaggacccaaggaagagatgtgtgcctgaatagtcgtcaccatatctccaagcttcctggcaaccagtgggaaaagaaacatgcgaggctgtaggaagagggaagctcttccttggcacctagaggaattagccattctcttccttattgcaaaagattgaggaatgcaacaatattaagaagaggaagtccccagatgggtagagagcagtcatatcttacccctagatgttcatcccagcagaagaaagaagaaggtgttggggtaggattcttcagaggttagcctggtactttctcatcagacactagcttgaagtaagaggagaattatgcttttctttgctttttctacaaacccttaaaaatcacttgttttaaaaagaaagtaaaagcccttttcattc

SEQ ID NO: 433 - DNA, 1231 bp, Homo sapiens
cttttactatctgcccaaggctgtcctggcttgcatcaacatctccagcatgcgccaggtgttctgccagatgcaggaacttccacaactatggcacatcagccgagtggactttgtgagaaatgccattacccccagattgccccctctcatcttgttagcatccccagcctctgccctgaaccaaacctaattgtcctggtcttaagttctgcaacccacccactcccccagcaaacataactcctagtatgctttactcacaggcaagggaaaggatggggtttgaacccctttggcctgaatatttgtaacttcccaactggtgcgggtcattacatttggtgtgtgtcccattgaatcaaccctgttgtttccttctgtcatgctttccacttcttcctggatcatctctccccatcacttgccttggtagtcactgccctggatctctttacccagcagtgatggcctggcttttcttttgggcaatccacccctatccctatcctgcaggctgtgtggatggtcacctgggtggcagtagtgaccctgagtgtggatttgggcctggctgtgggtgtggtcttctccatgatgactgtggtctgccgcacccggagctcctccaggtcccggggctctgcatcctgagctatccaacaccactgtactttgggacccgtgggcagtttcgctgcaacctggagtggcacctggggctcggagaaggagaaaaggagacttcaaagccagatggcccaatggttgcagttgctgagcctgtcagggtggtggtcctagacttcagtggtgtcacctttgcagatgctgctggggccagagaagtggtgcagctggccagccgatgtcgagatgctaggatccgcctcctcctggctcagtgtaatgccttggtgcaggggacactgacccgggtaggactcctggacagggtgactccagatcagctgtttgtgagtgtgcaggatgcagctgcttatgccctggggagcctggtaaggggcagtagcaccaggagcgggagccaggaggcactgggctgcggcaagtgaggcaggggagctcactgacccaaagatttgcaccgtgtgggtctgacctcatcatgtggagtgcagagggccctgatgacatgtgtgtgatgaggaccatgacccttgaacccccttacctaacgtaactaataaaatgaagctgagagctttgg

SEQ ID NO: 434 - DNA, 398 bp, Homo sapiens
ggctactctgcctccatcagcattttcaaatttcaggctctggcctttcaccgaatgcacttcccaccagtcctgtttacactgccaggttccgctaggagctttcccacctctgcaggtgcaggcctcgctgcttcttaaggcctttctctggggtgggaggaaacggaaactgtatgattgtctttcatattcacttttatagacctataatgtctacaatgtctgagagtggcgtttgcggcatgacttttaaaaaaatgtcctgctggtattggaccctttctgtgtttgtgaaattgctattttgtattaacacagtatttgataaacatttatattaagaagaataatccctctgctgaatattattgtttccaatggagtagaaagaactt

SEQ ID NO: 435 - DNA, 551 bp, Homo sapiens
  misc_feature 231: n = a,c,t, or g
ctcttctcccggtcccatcttctgagagggcttctcagcctggaaactatggaaacagcatcaaagagaaaggaatgtggggggtttccgctgccccccacccccagcggcccaccccatgcctcagcttcatgtctgtcccattcctataccatccccaccctgttgtatgtattataggatttgtattttctccttttttttcccccttccattccttcttcccctctngcattcaagattatgaaactttgctatgggccctgcacttcctttgcttcctcctgttcaccctggtggtgtacggatgaggcggagaggtgggacccccaaatatatatcagcccaacagccctaagtctccttcttttattattaggaaaacaacaacaacaacaaacaaaaaaatggcgtcatgaatatgaacagcattgtcagatgaattagttgaagtggttttttttttgttttttttttttttttttgtactgtgtcctcaaatttaatggattaatgtgtcttgtatatataaaaagaaaacctctaccttc

SEQ ID NO: 436 - DNA, 664 bp, Homo sapiens
  misc_feature 123,451,600,599,622,623: n = a,c,t, or g
acatggagaaactctacaaaaattacaggaattagctggacgttgtagtgtgtgcctgtgttcccagcttcctgggaagcagaggcaggaggatcacttgaggccagtagtttgaggctacantgagctgtgatccaacaactgcactccacccgggggtgacagagtgaaaccctgtctcaaaaaagaaaaagtatgttgatgttgatgttggtaaggaggatcatgaacgtttcatgtgtaatggtgttcctccactattcacctggcgggacgtggctctgaagcagcaggcacaaggagaatgggtgcctatgagtggcaaagaaaagaggggcaatcccgactcctaagtaacggtcaagacatctagctcaagccgggcgcagtggctcatgcctgtaatcccaaaactttgggagggccgaggcgggcggatcacttgagttcnaggagtttgaagtcagcctggccaacatggcaaaacccccatctctactaaaaatacaaacattagccgggcgtggtggtgggcaccctgcaatcccagctactcaggaggcggaggcaggagaatcgcttgaacccgggaggcggannctgcagtgagctgagatcacanncactgcactccagctggggcggcagagtgagactgtctcag

SEQ ID NO: 437 - DNA, 925 bp, Homo sapiens
  misc_feature 905: n = a,c,t, or g
gctgggtaatacctggtgtctgagtgattctctgcagacccttcccctcctcaaggatcacccatcctcctttcagccccctttatggggaccaggcagctctggagccagccacaggggctgttagagaagcaaggcctggagtggcctgcaccgagtagcagggtcagggttcgtgtgctcctcctcctgctgcaggggctgcacatcccattgccccacttctgctttgtgtctccctctgtctagcttccagggcagggagcaggccccacctagggctgcaggcagtctggcctgtgccagcacggtctcctgtgcccaccagccccacaggtgctgtgctttgtgctcttggctgctgtgctgggacagaatgggatgccaggaagagaagaaagggggtgcagtctgaggccaccaccccccttcctatctaagggagggctgaagacaaggggccggcattcagtggcagcagaaaggagaggctccttgaagctgctcagtcagaggcccccgtccctccttttgccttccgcagactgaagacctgaaggggctggcttttggagtgttgaggtgaatatctgggagcagagatcatgaatagctcagggcagtgaatggcgcaccaagagcagggctgtgtgtgggaggctgcagccaggattgcctcagctcctccccctcaggctgggaggatagcacaggctaggggctcggggtggagggtctcagctctgctgcccccaccccagtactagcctagcttcccaagctgtggcttagaggatagttggcttcctgcctctctcctctaaaatagcaagtctgggaaatcctggggtgagtggagtcaccccactcccagttgctggcagagactgagactaaagcatcanttaataaaccccccaagccc

SEQ ID NO: 438 - DNA, 351 bp, Homo sapiens
gaagggggctgccgatcatggtgaaaggggacattttcattgggtcctcgtggtccgtgtcctgggtactcggggtcaccgtgcagacagctgccctttgtctgccggacacagtgcaggcaggggagacaggtttagggctctgacatggggcacagggactccgagccaagggatgtcagggcagctctgtgcatctgaggcctttgcccttgctttgcgggtcagttcatgtccaaagcactttaggaggctgcagggatcaatacccaatatacccaacaactggaattgtttacacatgacctacattttggacggtttatcaataaacatgtgtgaacaactgtt

SEQ ID NO: 439 - DNA, 1265 bp, Homo sapiens
cgagttcctacacacacagacacacacacacacacacacacacacacacacacgggcaacatggcgaaacccagtctctacacacatacacacacacatacagacacacagacacacacacacactagctgggtgtggtggcgcacatctgtggtcccagctactcaagaggctgaggtggaaggatcacttgagcccaggaatttgagttgcagtgaaccgagattgtgccattgcactccagcctgagagacagagcgagactctgtctcaaaaaaaaaaaaaaaagtttatgtccttaaataaaaattcataggctctagattagattagaagatacagcttagatcaaaagggctcttttggatactttaatttactcgtgtgccctgccatgtggatgagaagtgattacatgtggaaattcatagtgttatctttttatagcattcatttaaaaaggttggatttatgtaggccttttccttttgttctttattgcagatattcaagagaagcttatgtggtgttagttcaccatattagagaatctattccaggtgtgagcctcagcagcgatttcattgctggcttttgtggtgagacggaggaagatcacgtccagacagtctctttgctccgggaagttcagtacaacatgggcttcctctttgcctacagcatgagacagaagacacgggcatatcataggctgaaggatgatgtcccggaagaggtaaaattaaggcgtttggaggaactcatcactatcttccgagaagaagcaacaaaagccaatcagacctctgtgggctgtacccagttggtgctagtggaagggctcagtaaacgctctgccactgacctgtgtggcaggaatgatggaaaccttaaggtgatcttccctgatgcagagatggaggatgtcaataaccctgggctcagggtcagagcccagcctggggactatgtgctggtgaagatcacctcagccagttctcagacacttaggggacatgttctctacaggaccactctgagggactcttctgcatattgctgacctgagaggatggcctcagagctgacttgggcaatcctccccaacaggaaggggagacattgcctgccactgaggaaacaggtcatgaaggtggagataagctgcaaggggcgaagcaactttatgtcagtggaaaacgtgtctctttaaagctgctatgtgaacagcttttacagtcattaaatttacctaaactaaggtt

SEQ ID NO: 440 - DNA, 556 bp, Homo sapiens
aaataaactgtatttgcaaatccaacattgagcttctggactacgctgactccactgctgaatcctcaatggaaagggtcgactggttgcagttgaaatgacctgaaatgtagcctctgtccttgtaagtcagttgacttgccgcacatctctttgtgtacttgtacggtactggcagaaaagtcatttttcaaaagccataggcttttccttgcccttagctgtaataatgcatctgattttgatttcctccagagctgtgtttctgtccatcacctgtgtattggccctgtgtttaccactctggcccactcctcacccccttgctcccctggtcttctggagtttgtgacattgatttgaaatggatggtgttctcttgagagcaagtgagattgttagaattaagttccaactatacagttttctaacatagctataaggtccttgttgctgtttgtgataactgatagataactcattggaaacgtgcatacatttatattcagatgaaattatggtttgcactgtctattaaatatctcgattaattttc

SEQ ID NO: 441 - DNA, 418 bp, Homo sapiens
ctcttcacaacagtatcaacactggcttctcccggttcattttatgcgtgcgagaagtcagtggtaactgctgcagggcttaatacattagtggtaactggtttaaaaaacaaagactgtaagcctgtgtgtgccactgtttgcttcaacagtatatcctactaataagcctcacctatttaatccaatgagttttaaatctaaatctcattcccttcttctttccctaccttttttttctttttttcttaaaaaaatattttgtgttattaacagaaattcatatttggtgtggcttaacggtatttcagaaggtcatcagattgtgagactgcttccttgaaacatttttgtgctattgttttaaaaaaataattaaaaaacagttggcgttaataaaaatgtcaatgtgaaactg

SEQ ID NO: 442 - DNA, 902 bp, Homo sapiens
gattcccttccactgttttatgaattaattccagttcttttcatgtatctttgaacctaagattatgaagtaatttccctattagggactagaatgacttcagttttttcatttgataaaaatcagaactgctacctttcccttttttaatgatgcaaaatgtagatgagtgcattaaggtttgtaagatctttatcattttatgtcattcattgaaaattgaaatgttcattctttttaatgttttcctatttccttttgcctagcatttgactttggtgtttaagttctgtagttccatgacatcattgtttgctgttgtgttacagagagagaaggaacctcacctgtggctcagctcaccccacatccgtttctcattacgtgtaaataaactgtcagagctgatgttacagcttttacagtttaaagcattcccctcgtctctagttccttttttcttgttacatgttttgggcactttccctcattcaccaccttccagggtttcatagaaaataacttgttacaaaatcagttcaattctaatgtggacatagtggcatgttcataattagacccatataggggacactgagctttaaatcgttgattctaaactctatacattaaaaaaattcagcccaggcccctcaaagcctgagaaaatttaatttgctcttaatttaatgttccaaaactcactcttggaaaaatgcctgttggaaaactacaggtgggtcacatgtgggggctgtctccgtgacactcaggattccagtcagaacctaatcctcatatctattgcctacaaaaatagaccaagaatgttgctgctcttttataatcctttaaatatttaacattcaagttttctttgtcttaaattcagccttttcctt

SEQ ID NO: 443 - DNA, 553 bp, Homo sapiens
tggaattgctggagactttgcacctgggcttggccagctcccggctcagacctgaagctgagccagagctaggtgtgaagactccagaggagggctgcctcctgaacactgcccatgttactggccctgaggcccgctgtgctgcccttcgggaggaattcctggccttccgccgccgccgagatgctactagggctcggctaccagcctatcgacagccagtcccccaccccgaacaggccactctgctgtgaacatccctgatgtgaggctgtgaaaaggcatatggacctgcaaaggaggcccccaaccagacagacgtagtttcaaacgagggcactgcccctgcctgcccctttggtgcccaggcacagaccctgatagtgggtttgggtcaccttggtatggaatgtatgtgctgaccccctaggtgagtctggggattggaacagggatcttaggtctgcctctctctctctctctctctctctctctgtgtgtgtgtgtgtgtgtgtgtgaagttttttacaggtgaataaacaaagtttgaaag

SEQ ID NO: 444 - DNA, 1230 bp, Homo sapiens
  misc_feature 2,195,924,1166,1167,1168: n = a,c,t, or g
gngatttttcaagatttttttttatttaaaaaagaaaggctttgggggatggggagaataaagatttttgttttgttttgttttgggtgctaagggggcccagagccacttctctgtggcccctgctcaaactcctccagagattctggcatgttgaggctgcagctcttttggttattgtgatcaaggatttcngggcaccttcccctccccttttgaagacttaggactggaccagctaagggctgtaaacaagcatttccctcccttggcaggaagtgcttaatgtctttgcttttgggaaccggtgttctgggcaggctaggaggccgcgcctgacctgcctgtggctctcttcccactgtgggggtcagaagatggtggctgcctatgtgcatgtcacagatcctcacttccagctggtggatgtaggatctgaggcccagagaaggttggtgacttggccatagtcacacagccacctggatagagatgagtggtgagtggtgaacccggagaaacatggcttcttgcctccttggtctttgtgcacgggcctcccgcttcccgagtctctcctggcccagcagtggtttgctgaaggctgttttattttaggcaccggctgagctacctctgatcttgttgggttagccataggtgtggttctttggtttttcagtttgtataaccatgttctttgttcagctcctatcagggttagggaggtcaaacacctatgtgtcaggatacgcctgacacacactatttaaaactcacactgttttaaatgtatagtatttaaaactttatggtcagctgtacttaccggctgagtacagaactaggaaagctggtggctacttgcaaggagcagctgcttagtagcggaggttgagtaataaggaccccagttgctgaacngctcctggaagaatatctgttcccggctgggcgtgatggctcaagcctgtaatcccagcactttgggaggccaaggcgggtggattgcctgagctcaggagttcgagactaccctgggtaacatggtgaaaccctgtctctactaaaaatacaaaaattagccaggcatggtggcgggtgcctgtagtcccggtgactcgagaggctgaggcaggagaatcgcttgaacctgagaggcggannntacaatgagctgagatcatgccgctgcattccagcctgagtgacagagcgagattccgtctc

SEQ ID NO: 445 - DNA, 715 bp, Homo sapiens
  misc_feature 257,270,271,301,473,547: n = a,c,t, or g
aaacgttttcaaaccccttacagttcctggggcaggcggaaacaggctcacagattgtgtgtcggccgcagcagtgattccaacaagcagctattgggggggaaacacagcatttaaaaagatcatcattaaaaaacaagatttatacaacaattacttaggatgtttgtgatctgccgaccttgctatagatgccatgttaccaatgatttcctgtggtgggggcttgccattgtttactctcttatttaccaacntctggcctaggcnngacagtgggcaccttcccccagccctggcngggcccagcgcctgtgttctgtgttagaaaggttttatatatatataaaattacatatatatgtagaaatatatgtaattttgggggccccgtctcctcgcacattttacagtacctcatttttcccatgtatgtatttgagaaaatgctaatatatagagaaaaaaatggntcttaaagcttaaatgtgtggttttttccattccatgggattcacattggtttgtagcatttaacataactagnatgttgtattatatatatgtgtatactgattgaaatttttaacagatttgtactttttttaaaatgaaagttgctagttctgcttgaccaagtagtgcaatcattattttttttaatattgttgctgatttcagagggatattcactaataaatgtatgatgtatacc

SEQ ID NO: 446 - DNA, 1750 bp, Homo sapiens
tctttaaattactcataatttataatgcttaatataatcttaattaaatttagcagttttagtataagatgtgccattttgtcctctgtatgtctgaatgaagctataacatttgcctttttattgcaggttttcctttggaatatggataaatacaccatgatacggaaactagaaggacatcaccatgatgtggtagcttgtgacttttctcctgatggagcattactggctactgcatcttatgatactcgagtatatatctgggatccacataatggagacattctgatggaatttgggcacctgtttccccctactccaatatttgctggaggagcaaatgaccggtgggtacgatctgtatcttttagccatgatggactgcatgttgcaagccttgctgatgataaaatggtgaggttctggagaattgatgaggattatccagtgcaagttgcacctttgagcaatggtctttgctgtgccttctctactgatggcagtgttttagctgctgggacacatgacggaagtgtgtatttttgggccactccacggcaggtccctagcctgcaacatttatgtcgcatgtcaatccgaagagtgatgcccacccaagaagttcaggagctgccgattccttccaagcttttggagtttctctcgtatcgtatttagaagattctgccttccctagtagtagggactgacagaatacacttaacacaaacctcaagctttactgacttcaattatctgtttttaaagacgtagaagatttatttaatttgatatgttcttgtactgcattttgatcagttgagcttttaaaatattatttatagacaatagaagtatttctgaacatatcaaatataaatttttttaaagatctaactgtgaaaacatacatacctgtacatatttagatataagctgctatatgttgaatggacccttttgcttttctgatttttagttctgacatgtatatattgcttcagtagagccacaatatgtatctttgctgtaaagtgcaaggaaattttaaattctgggacactgagttagatggtaaatactgacttacgaaagttgaattgggtgaggcgggcaaatcacctgaggtcagcagtttgagactagcctggcaaacatgatgaaaccctgtctctactaaaaatacaaaaaaaaaaaaaattagccaggcgtggtggtgcacacctgtagtcctagctacttgggaggctgaggcaggagaattgcttgaacccaggaggtggaggttgcagtaagccaagatcacaccactgcactccaacctggacaacagagcgagactccatctcaaaaaaaaaaaaaattgtgttgcctcatacgaaatgtatttggttttgttggagagtgtcagactgatctggaagtgaaacacagtttatgtacagggaaaaggattttattatccttaggaatgtcatccaagacgtagagcttgaatgtgacgttatttaaaaacaacaacaaagaaggcagagccaggatataactagaaaaaggatgtcttttttttttttttttactccccctctaaacactgctgctgccttaattttagaaagcagcttactagtttacccttgtggtataaagtattataaattgttgtgaatttgaagaatccgtctactgtattattgctaaatattttgtttatactaagggacaattattttaagaccatggattt

SEQ ID NO: 447 - DNA, 1031 bp, Homo sapiens
  misc_feature 876,939,978,1002,1027: n = a,c,t, or g
ggaagcagcagcaggtgcctgaactcgtaactagagaagagttatccttcttccctgccttggaagccctggcctgggaggaggtcataccccaccgttggagcccagctgcctgttttcttttgcaggggatctgggcacctgtgccttgaggagatgctgccaggagcatgggactctgacagtcctttgtataaaggactaaagggagctgcccttttgaccctgttctaagctctgccttgccaagcccatagtgtgtgcccaaaagctgtcaagtggccaagacagctcgtttctggagagtatgagggtgtgttttcttattgtgaaaggaactaccttctcttagagggtaggaagaatgtggtgtgtgtgtgttctcataaagcaactggacattataggtgcccaggtcatctataaaaacgatccttgggctgtgtaaaaatgaagtggcttttcagtatcctctttcacacttgctgcttcgggagactatgcaatgatgggaaggtgattgcccctttatttcattcagtgccatggtccctgttgttgtagtaatttatttgtttagttcatttttttttttcttaacagtcaaggggaagagtgattcctcacactgctttcaagctggactgagccagtctcattctgggaaagaaacgctgtgtccagaactcagcagctccatctattttttccagtcgaaagaaactgatctttaggcagtttttacttggccagaaagcagtgctgaatacttgaaactgtgtgctctgttctacttaatgttctgtcagaatgttcttttgtaggcagtatgtcatgatgtaatcatctatctccttgtctgtttccaagttacantgtgaagtctgcgacccttttgaggtggtcatcaaagacacagattccttgtttaaccaagtntcccaaagcatgtacctgaagttatatcattttttattntaaaaagctatgcagcttatattntgaaaactattaaaacatataccantgtt

SEQ ID NO: 448 - DNA, 2166 bp, Homo sapiens
agaagacagctggtttcaaatccctgcccccaggcaagtaaaaccctgacttgctcaagacagaagatcttttctcctgtttttcaaaataaacatatatagggatggaccctgtgcattgtggcctgccttggtgtcctagaattggagccagtctttagcttaatgtctgaagtatttatacggccaatatgtgttttcttatgtcagaccaaactgtctttttgaatatcagttcatttcctctcaccgagtgcttttcggtgagaggcaaagagaaagaatgaacaatcaagtattgacagactggcattagcaggacagagccatactagtgacaagggcatcccaaggcacttgcccagagctgcagagttgtgtgtgccatacctgcggctcaaagggaaggccttctatcccctgagtttctatcagctgaaaatggcaactgctgtctcagtaaaagctctgtcttgactgcagaggctccaaaagcattcacagttgagggggagaaagacagaaagaagaagccaaagataacctgatccctgcctgtctgttggcacctgtcatcctctggcttctgctcccaaaagcaagtctggatgactgagttttgtggacatggcactcccggagacagcagtggccaccatggcacccagagtttgcccaagtactgaatgttttgtgagcaaccatgttccccaagtaggtagccagcgctgcagaaaccaaacagcctcttagctacctgactttaaaaggaatgacctaggtgttctgccaaaggagttatctatcatctctggcaaacttgacaatcatcacttacctcgacaaccctgccccacatcactttataaagtcagcaggatgtcctctcacccaccctgtgctggtgtctaacaaatttatcttgtcatgctcaaatgtgtttggcagccacaccgatcggctgggtgctgaaccgcctctctgtaattgtagcatcaaaatgacaacagcagcagagcagcgaatcttgcacagccccacagcatgcctgagacaagactccaacaagtaataattagctttttttctcctgccgcctacagtacctgtctaactaaagagcttcccaaagtggagggaaaggccatagaatccaggtgtcattcagagccagtccttgctgaaatgtggtcttccagtggaagcacctgtattattgagaggaaaaagtgttggatgcaaagtaacaccaggactagagagaaagagaaaggtgaaccatcctaaggagctttggatacttttttagaaggataaatattatgcttactgaggagaaaaaaaaaagcgatcacagaaaaatttcacagctaatatttttacaaaagttgtgccagacattacagagtgaaaacgtctctcaaggtggaatgctttagagagcaaaggcttagcatagacctagacccttgtgtgggtatgacatgacatgacatgtccatgtcaaaattcactttagtcagaaccagagtattgataaacaaaatgtcagttacctggagcagtcctggagaggttaagacattctatactgttctacgtcaaccatttctacaaagttgtccagacacctaaaagcagctttcttggttatccagatgccagaatcaaccttgtatctgacaatgcacatctgttgattctaaagtatatttatgtgtgtgtgtatgtgtgtgtatacagcacatatttacatctatgaagacatagacacttacagagacccacatgagctggcactttctgagcctttacagcctttaagactcggaggttgagaattagagacacaagagaggctgtggatggcctattaaaatgattaaagatgtaaattcagtgccattttaaaactgttcatatttatcaaacaattactgtctacagctacattttttgttaacttacttaaagtcatgtcgcaagaaagatcaaacccatgaatgcttagtagctaaggctagtgttcaaaagcactctaaaagacattttgtccacattttggaaaagaaaatatttgcatgtttaattcataatttaggctatctttgagtatactgtaaagtgctgtgtgatataatatcaataaagtacttattaaatggc

SEQ ID NO: 449 - DNA, 1107 bp, Homo sapiens
  misc_feature 967: n = a,c,t, or g
aaaggctttattcagaggtcaaacttccttcaacaccagaaaattcatactgaagagaagctctatgaatgtagtcagtatgggagagattttaactcaactacaaacgttaaaaataatcaaagggttcaccaagagggactctccttgagtaaggcccccatacatttgggtgagaggtctgtagataagggggaacacacaggtaacttataaaataattactttcccgcccagtgagtgatgtttggaaatgcgtggaattaggattcatgtggtttctaagatttggacatgtcagaattttgtgagtcatggatggggctgcttttgcagtgggtgccacctgccactgtgcagccctacttggctcagcccttctcctcagctgtgagcactgtcctcaggagagtcacagggcttgacacctgactctgagctggaacagtaggggcagggagaagacaggtctcaagaaaaggtttttaagaagtttcatccccagttaagcagagtccatccttgaccttaaatcccttattacagcacaactgtgtatctaatcttacgatttaggagaatgttacctaggacattttgatgtgttaagttgaagaaaggtaactcgtgtatgaaccccgagccatttccctgttgtcctgaggaggaactccaggcctcccatcgtgtgccctaaggcctcctgcgtcctggagccctgcctcccactgcctgacttcctgccacacggttaatgctgcagcaacaccgactgcttcatcttccctgtgccccccgtggcttcctccccctcccgcctttgttcttgtgggggggtctcttctccgctaattaactctgaatcttggttcaagccacgccccgggcctcctgtcattgggtgtttccctcaggcttggttggcggccctccccccccttctgtggctcggtgattcctgctattnctttttttccttgcttttgtcggattgttgtgttggcctttctctgtccctgtgctgtggggttcctgaggacggtgatcatatctgattgatttccatgtgtcccctgtctagcacagggcaataaaaaatccccccct

SEQ ID NO: 450 - DNA, 2010 bp, Homo sapiens
ggtaaagggggtcacctactccctggagtcgttcctgggcccgcgtatgtgcacagaggacctgcccttcccaccagccgcgtcgtgtgactccttcaagaaccagctggtcacccgggaagggaatgagctctatcactgtgtcatctacctggcccctggggactaccactgcttccactcccccaccgactggactgtgtcccaccggcgccacttcccaggtcagcccggggccagcgtggggggagctgcctctgtgggcttcatatagaggctctcagcttcttggtgttgggggaccaggctcccagatcagggtcattgaggccaggagttgactgctttatgcaggctggttgtgggcaggggaccgtggggcccagtcagctcagcatttggagtgacatcggggcaacaggccatgagtccctttgggtcttggctgccatggggtggacacaccgggctctggacggggagtagcggcattccctgcctctgcaggctccctgatgtcagtgaaccctggcatggctcgctggatcaaagagctcttctgccataacgagcgggtggtcctgacgggggactggaaacatggcttcttctcactgacagctgtgggggccaccaacgtgggctccattcgcatctactttgaccgggacctgcacacaaacagcccaaggcacagcaagggctcctacaatgacttcagcttcgtgacgcacaccaatagagagggcgtccccatgcgtaagggcgagcacctgggcgagttcaacctgggctccaccatcgtgctcatcttcgaggcccccaaggacttcaatttccagctgaaaacaggacagaaaatccgctttggggaaaccctgggctcgctctagagtctctttcctgattatggctgctaagggatctttttcaaacagagtgagggtcttttcaagaggaggcccatgaggccatccaggtaagggcctgcctcagcgtggttgggagtctgaccaggtaggacttgaatgattcgggctcccacctgttccagaggtgcagacaagaggtggcgagagcccccgtcatgcccctcaacctatcccgttccttctgcctacaaataaaaagtgcaggctggaatgatctcagtcacatttggatctttttaaacactgtatagacggaagagcctgcattcctgaccgaaccttcagttggtctcggttgtcgttttttcttgctgctcctccccccatcacctgagctgttttctgttggccccttttgttttttggccttaacgctcctgctgcacagggtgaggtacctccttggcacagactgtggatgcctctcccccagcagagccacacagccttcgtgacaactgctttccgttcccacattcacctcatcctgctctttagaaaaagcagtctttgtgcttgtggctgaacgcatcaccctggactctgctagtgtcttctgaggacactgatgacactgattaatgatacagacctttgcaggacctgatgagtgacccttctggagctggccaggtcctctgcagcaggcaagaccaatcaatcactgaacctgcctcatggcaccagagtgaacagggcaggcaggtagtaggcccagctggggaaatgggagagttcctgtccccctccacatatccctacatgaaatatgggaaagttgctgctattgattcagggtctgtcttggaggcagaggacccttggtggatagttggtcaatgcctggaaaacctgtcccagtttatcaggaacgcaggcctggggagcccccagtggcggggacagggccagatttcatgttgaccctggggatgctgtgaatttctcctgcaggagagacatcattgaattttttcaactgtatcagtagcacagtatttttgtatgaaaagtgggagacttctgaacagtaattcatttaattgcaaagcattttgaaataaaaaaaatcaaactt

SEQ ID NO: 451 - DNA, 817 bp, Homo sapiens
atctctccagccctgcagattttcacctgacttgttcagccccatgcgtagactcccgctgcaggcctctggcctgtggctcactgcatgcagcccctggcgtgcaatactagtgctccacggcgcgatgtgcttctagcccttgcactgcacctaggctcagggttcaaacggccagcccgaaaagcctgcctgccttctttctggaaacagcacgtccccggccgtgtgcctgcccctttctctactgagctagtccccaaaccaaaggcaagccccctcgggcctcgggggatggggccggccacacccctgactccgccctggctctgccccatacccctgccgtggggccgacctgggggatgcagacatccggctccgtattcctgcctatcggggccaggatgcaaaaacaatttttgcgtaaaagatgtcacactgatctgctggagtggggtggacacatgaattcagttttatcatgaacactcgccactggctgcttgttaattcagggataatggtggcattcttacaaactgctcgggaaatagaatgacgggaacacttttagggagcccaggaagttaccagggacattggtgtcgccggcccaggcaacagcagcgtacgcttttcaaagatcattgagttgtcttagaatttgaagctgtgtaatgacaatgtcacctggagttcgtctccatttcttaactttttgttgcacaagtatttggacagaagtcgaactgtgaatgagatactgaaatgcactaaattgtattacattaaactggagttacttgatacaatg

SEQ ID NO: 452 - DNA, 1112 bp, Homo sapiens
atgggacctgagaaattttcctatcttgttcaatcagccaggacagttatttaagtcaaacctgagcctgaatggcttatttgatagtagattaggtcctgctcctgccagaaaggataagtttaacatgcagggtacatcaatagggccaatttaaaaaatgataacacatattagtatgtcattttctatagctcagctatcccctaaaatctgccaactatatgtgtatcttgtctgtttacctctcttatttattatctccatacagtataagttattttttttccattttgctctcagcacttaccctgctgtattttgcacccttggtttgtaaattcacttgaaagtagccttgcagagagatcttaagccccatcagtcaccaaagtggttcccttcatcacaatctgccctagaggaaataggcaagtaaaatgatatataaagccatactatgtgctttctgagtatatactgcacttacctttgtgagcggctgtaggagggtctatcctcgaagctagcattttctggcatttaagtttgtagataatcactgttgtttgagttatttattagatattatttatttaatttatttctctcttcctttcacgaaaattcctttagccccatagatgtgcttgcaaacccttcctaaaattttatttggaaagtagctcataattttgctaagaactgctgagttttggagtgaggggaaaggaaaaaatagagaattacctctgtgataatttttataaaaagcagcaataattcgaatggctatgcaagttaatgtttttagagtcttttcttcagtctaaaatgagccagagttattctttaataatctgctgtttatgcctttggggagtatggtacccatgagccaagcctccctgaaattgtacagagggattttataattgaattaaaatttaggaatgcaatagcttgtaaagagcctgctctccaacatagggtggtctcattcttctggagacttttttagataaagtaaaataattgtttaaatattttgtttaaaatatgactgtttttcctccctttttcctagcagaaataaagctgtaagtcttatt

SEQ ID NO: 453 - DNA, 836 bp, Homo sapiens
  misc_feature 26,48,610: n = a,c,t, or g
gagctgtgaaggcagtcgtctccgtnacacagtggcagcacttgagtnatgcactgtgaagaatgagaagggaaaagcaaaaattatccttgtgaaatatctgccgattgtgccccactctctgcacctgacttttcctagttgtcctggtgctaacacaggagctacaccttgatcctctcctggcatgaaaataaaacaaaggttttcgttgttgttgttccattgcccatttcccccatgttgtctttcccttggctgatgcctcctctgggtcacattgcttcttatcctgaacacttgacaccttgagggtagaatttagcgtttggtttttacctcctagcatatgctgtttggtatgtgagggtttcagtacaaatgctgctgtctatttctgtgcacttaacaatggaacccaaacagaagagaataaagccttgttaccaaaattgggaaagaacatgtgtccatttggaccaaacgttgttggtttttaaaaaattttattttgtttttttgtttttgtttttgttttttttcatcttaatatgtaccagtggcacttaaccaaaagatacagtgatatagccatgtatctgtctacttngcgtggctgttttgagggactgtcccatcagtgaacaaactgcatggccttggagagagactctgggctcttggctcagatgtgttcatcaaatactcctttcagagctgttgtgggtgtaagtgacatgatgtggccaaaaatccaaactgtgcagttgcgttgtgacaaacatgcaatgtgctgtaaaaattcaatacagtttaaataaaatctctatattagt

SEQ ID NO: 454 - DNA, 1354 bp, Homo sapiens
atatccgcccggtcctctgagcctttctactctgatgacaagatggctcatcacacactccttctgggctctggtcatgttggccttcgaaacctgggaaacacgtgcttcctgaatgctgtgctgcagtgtctgagcagcactcgacctcttcgggacttctgtctgagaagggacttccggcaagaggtgcctggaggaggccgagcccaagagctcactgaagcctttgcagatgtgattggtgccctctggcaccctgactcctgcgaagctgtgaatcctactcgattccgagctgtcttccagaaatatgttccctccttctctggatacagccagcaggatgcccaagagttcctgaagctcctcatggagcggctacaccttgaaatcaaccgccgaggccgccgggctccaccgatacttgccaatggtccagttccctctccaccccgccgaggaggggctctgctagaagaacctgagttaagtgatgatgaccgagccaacctaatgtggaaacgttacctggagcgagaggacagcaagattgtggacctgtttgtgggccagttgaaaagttgtctcaagtgccaggcctaaaggatttgctgggggcaaggtgtctctgcgggattgtttcaaccttttcactaaggaagaagagctagagtcggagaatgccccagtgtgtgaccgatgtcggcagaaaactcgaagtaccaaaaagttgacagtacaaagattccctcgaatcctcgtgctccatctgaatcgattttctgcctcccgaggctccatcaaaaaaagttcagtaggtgtagactttccactgcagcgactgagcctaggggactttgccagtgacaaagccggaagtcctgtataccagctgtatgccctttgcaaccactcaggcagcgtccactatggccactacacagccctgtgccggtgccagactggttggcatgtctacaatgactctcgtgtctcccctgtcagtgaaaaccaggtggcatccagcgagggctacgtgctgttctaccaactgatgcaggagccaccccggtgcctgtgacacctctaagctctggcacctgtgaagccctttaaacacccttaagccccaggctccccgtttacctcagagacgtctatttttgtgtctttttaatcggggaggggggagggggtggttgtagctccattattttttttattaaaaaatacccttccacctggaggctcccttgtctcccagccccatgtacaaagctcaccaagcccctgcccatgtacagcccccagaccctctgcaatatcactttttgtgaataaatttattaag

SEQ ID NO: 455 - DNA, 1820 bp, Homo sapiens
gacggagtctagctctcctgccacccagagtggcttccatctcagcactctgtgggtctggtgatggaagatgcagtctctgctgatcacatgtgccctctgccagggcacctactgagaggtgcggtcctgggggtggaggcctgcctggcaggtgtgcgtgcctcgtacgtgtgttatgggcactggtctaggccaggtatgacacccactctcctgtgagatttcactttagtttttaaaaggtccagttctacagagtgagacctatctatctgagtactacatatgttttaagacttggttctttttttgagggatccttgaccctgggaagtctggagcaccctgagaagggggcaccatgtgtgcctttgcccacgtgtcctgaggggctgcttgtctgggagggagggagagaacattcagcagcaggtgcttttttatggccttttcttaaaataacctaagggggacacatccatcttgcagagaagtttacagaactccccttgaaaactgctgctgaggctcctgttaaattttctgtggcatcttttatgccttggtaaaaactgcagtgtctttggacctgagagtggctactccgtggttttgtgacctgtaagcgtggggttcaggggtgtgtggccctgcagggtcccacgcctccctgagcactgactggaagtttcactggctggtggctgtcccttctcccatcagggtccccagcaaagttaactacacagaggacccaggggaaacgagctgtgtagccactgacttgctcgcgcggccgtggcctctgaggggcactcgccggttaagacagggtgggagtagtgctttccagttcagactctaacttctcccaaagtgtcctaagaaaatactggatcggctcatagatttatgctccttatgatgccctaacttggaaggttgttctagggacaggccgggcagtgtccccacacacaccttagagtcgaaggccccagggccccgctgtcacttgcccaaaagatcccttccggcaggtaagggactaccaatgcttacgtcaaaacagcagaatcggctttgcagtgcactttggggagcagatattaacttatttttgtgttggacagtagtgaaatcttgtgatttttaatcgctttgataatacttccaaattttatgatttttctgaaggaaataatgcaaacattttaaatatgtttctccccctttccaaaaactgttaaactaatgagcaagtaacactaactttgaatgtctctacaatacccgttgataactcagtggagccaggctttggggtagcggccctgagcttgcagggtttctcgccactggggctgaccacgcccccagctgtgaccgtgggtgtggctggctctcggccctgcccagctttgttctgaggacgtggtgacttcctgaacatcagcttcaatcctccatcattaatgtgaagcaaaacacaaaaaccgccccaatccctcaggattccttggcatccgaaaccagcatctgcacctaaacccatacccacccgtgtgcgcccacagggggatgtgtccgaatgggcagcttaaaatgtggtcacctgtgggggaaactcttcaggcacctgaagtgagaacccagctgtccgtcctcaggccggcctttcttccggcgacacccgtccatggctggctgggtccccttcgcagtgtttgtctgtcttgacatctaaaccccggcgtgtgcagtgcccatcttccaggactaccttattttccagaattaaacctgttttataattc

SEQ ID NO: 456 - DNA, 1782 bp, Homo sapiens
gctgagggctcccaaaagggagtctgcaggcgtcaacaaagcttgggcgtctgccctcctcacctgttgcgaggtttcccaggataacctccctggcctcggaaggcatcatagttccctcgaccagcaccatacggggcatgggggtatggagggcctcctgtggggactgcagggcggacagcaccagctatgacagagatcagtgttgagttgcaaaactatgtcctcaattccatcctctgttttcttctcccaaagccacacactcaccaagccccttcatctccctcctgtacttacctccatagcccaagatcgggggccggggctgaccatagggcatcaggccctggggagtctggtgtgggtaggggagtcctggggtcaaacctggggggagtacaacacggacagggacatgaattactgcgggggcggggagggggatacgggtacaattgacttctagggctatggcctgaggatggggcagaaacttctcggggtgacacgttaaagagaaacaggagtccctgggtagtcaaggaagagggcacatgcgaccttcatggatcgtatcttactctgggcggggccaggtggctgggctggcttgatctcaggcagagctgggcgcttagcatcagtgaggaagttgttaaaaaacgcgacttcctttttcacttcctcaattttctctgcatgcttgttgaagatatgttgcgcacaaactcaggaccctgggtggaaagaggagaggggtcaggacagccacataagggttgcctcgctcccaggcccgagctggaaggattcccagctcccgcctgccagtgcagtaagcagttcccccacccctgcccagggggcttcctgtctcaaccccacctcccaccacggtagcacggccattctccaacatcccacaccttgaatttcttgccactgagaggacacagccacttatccttgcccagttcctgcgtgttggaggtgacgaacttctccacttcctgctctgggtctttgcgccccatcttctgggcctcttcctctgagagtgactcccgcacactcagcaacggcgtgagcttctcctcaaaagtcttctgccactccagcactgtggtttgggaacagaggaaggaaggttggcaagggagccagaaggaaggatggtggcaaggggctggaggaccaaggccaggggcagccgggaacaaaggggaacctggagctcaccttccccgtgactgatgcggttgggtggcatgggcccccgaacgtggatgatcccacagcgattgggcatctcgtcctcgttggggtactcacaggtgttgtaataatccaaggaatgcacgatgcgcaggtaaaggaggagcttgtccaagacctaagggaagtgaatgcgagcgttcagctcctgccctcaccgcccgagcccccacgtgccccgcgctgccactggcaccttaatcaacttctcatcccgctccacgttgatctctgccgggttcccttccttaggaggctcctcaggaggagcgcccccgctgctccccagcagctcctcctcctcggcgcttacttcctcgatcaggtagtcggtgatattcttcaagatcgggttttgcgagggcaggctctgatgggaggaagagaagcaagtaaggcagagaagaccttcagaggaggtaacctgagactttccacaagtgaaagagcagcgaggggacaggagttcaccggacataaatggcaccttttgcccccttg

SEQ ID NO: 457 - DNA, 2607 bp, Homo sapiens
cacggccccgagcagccatgctgggcgcgcgggcctggttgggccgcgtccttctgctgccccgcgccggtgcaggcctcgccgcgagccgcaggtgtcctggagtctggcccaggacctggccccacaggagtcccagcaggggtagctcctcccgggacaaggaccgaagtgcgacggtcagtagttcagtgcccatgcctgctggagggaaaggaagccatccttcatctacaccccagagggtccccaaccgcctgatccacgagaagtcaccatacctcctacaacatgcctacaatcctgtggactggtacccctggggacaggaagccttcgacaaggccaggaaggaaaacaagccgattttcctctcagtcgggtactccacctgccactggtgccacatgatggaagaggagtccttccagaatgaggagattggccgcctgctcagtgaggactttgtgagtgtgaaggtagaccgtgaggagcggcctgacgtggacaaggtgtacatgacgttcgtgcaggccaccagcagcggcgggggctggcccatgaatgtgtggctgactcccaacctccagccctttgtcgggggcacctatttccctcctgaggatggcttgacccgagtcggcttccgcacagtgttgctgagaatacgagaacagtggaaacagaacaagaacaccctgctagaaaatagccagcgtgtcaccactgccctgctggcccgatcagagatcaacgtgggtgaccgccagctgccgccctctgccgcaccgtgaacaatcgctgcttccagcagctggatgagggctatgatgaggaatacggtggcttcgctgaggcccccaagtttcccacgccggtgatcctgagcttcctgttctcctactggctcagccatcgactgactcaggatggctctcgggcccagcagatggccttgcataccctgaaaatgatggctaacgggggcatccgggaccatgtggggcagggctttcaccgctactccacagaccgccagtggcacgtccctcactttgagaagatgctctatgaccaggcacagctcgctgtcgcctattcgcaggccttccagctctctggtgatgaattctactctgacgtggccaaaggcatcctgcagtacgtggctcggagcctgagccaccggtccggaggcttctatagcgcagaagatgcagactcgcccccagagcggggccagcggcccaaagagggcgcctactatgtgtggacggtcaaagaggttcagcagctcctcccggagcctgtgttgggtgccaccgagccgctgacctcaggccagctcctcatgaagcactacggcctcacagaggctggtaacatcagccccagtcaggaccccaagggggagctgcagggccagaatgtgctgaccgtccggtactcgctggagctgactgctgcccgctttggcttggatgtggaggccgtgcggaccttgctcaattcagggctggagaagctcttccaggcccggaagcatcggcccaagccgcacctggacagcaagatgctggctgcctggaatggcttgatggtgtcaggctatgctgtgactgggctgtcctgggccaagacaggctgatcaactatgccaccaatggtgccaagttcctgaaagcggcacatgtttgatgtggccagtgcccgcttgatgcggaccatgctacaccggccctggggggactgtggagcacagcaacccaccctgtggggcttcctggaggactacgccttcgtggtgcggggcctgctggacctgtatgaggcctcacaggagagtgcgtggctcgagtgggctctgcggctgcaggacacacaggacaagctcttttgggactcccagggtggcggctacttctgcagtgaggctgagctgggggctggcctgcccctgcgtctgaaggacgaccaggatggagcagagcccagcgccaattccgtgtcagcccacaactgtcggctgcatggttcacgggccacaaggattgaatggacaagtgtgtgtgcctattgccgctttttccgagcgcatgcgtcgtgtcccggtggcgttgcccgagatggtccggcgccttctcagcccagcagcagaccctcaagcagatcgtgatctgtggagaccgtcaggccaaggacaccaaggccctggtgcagtgcgtccactctgtctacattcctaacaaggtgctgattctggctgatggggacccctcgagcttcctgtcccgccagctgcctttcctgagtaccctccgacggttggaagaccaggccactgcatatgtgtgtgagaatcaagcctgctcagtgcccatcactgatccctgcgaattacgaaaactactacatccatgactgccccaacccccttggggtggggcagaaggtgaagcatcccaactgactagagactcaggccctgcagggccctatagaacctgtggccatccctgagcaccctgccaccaggtgacctcggccatactcactgccccccttgggcacccactcaccctagaataaacttaacaatgtcccgtg

SEQ ID NO: 458 - DNA, 645 bp, Homo sapiens
ccttggacaagttactaaacctccctggacctctgtttttccttctctgtaatatggtgctgtctacccatcttcctggggtgatggaaagctcaaatgggtggagaactgtgatggtacttgggaaactgcgctggaatctgtgcatccctgggaagacttgctgcctcctgaagagcacacagagggacagctcacagctacaggctcatttggttttgtttcttcagccagtgcctcaggattaagacctacaatacccaggagagcccaaacatggcagtagccaagagcatccagtctccactgtgtaccatctcttagcaagcatgtcattcagcctgacaccgggatgtttccagcaaatctcttcccgaagactctcatcagaggccaagtggttgcagcagattcgtctctgtttccaagctacaacaggccaaataagactggattggatcagagaagatgggtcctcccatctctttcatgagctgggcccctggcattaattggacaatgcagatcgtttattatacttctttaatagaactgatgggcaaatatgtatatttggaaaattggtgttttgacagtaatggtaggttcttaagaagaatgaagggagtggttggaacccaatgg

SEQ ID NO: 459 - DNA, 659 bp, Homo sapiens
cagccttggaactcctcaagaacctgaagattccagtggtcagtgtcggtggggggtgggaggagagagcggcagagaagctctgagagccccttcccccacaacaaatctagctctagttgttatatttaggcaaaactttgtagtcttctttcccttttatgatggattttgataaaagtacaaaacagggtttttcttttttatcacctttgaatttggaaattttgagcacccaagctcttctgtacctatttaaagtccaccaaggggactgcagctcctagaacatgagaatcaagcctcttaattttaaactgcggaatgtggcctctgcttcctccgtcctcctgcccaaggacgacgaggattgctccagggctgctgggtagtttaccgtcccttctataggcatggagttggcactgacatcacagcttcataaccccaccaccgccagcttcccctgcctcctacatccagtctgttcttgttcatagtgagaatcctgtgttcccacttcagtgacacctgaattgtttgttgttgttttttttttttattgtcttcaaagaggaagggccccattaaagggtgaacttgtaataaattggaatttcaaataaacctcatgtacttgtgtttataaagaagaaacc

SEQ ID NO: 460 - DNA, 1282 bp, Homo sapiens
aaaagatgaaaaaccccacatcgtctgtccctgcacctcccatagactggctttgctgactcagtctcatgggattgttctctgaggctcaagaggtcaggaggcccaggtgaacgaggtggtcttcagccccggggagtcccactgcgccacatgcagtgaggatgggagtgtgcgggtgtgggccttggccagcatggagcttgtgatccagttccaggtgctgaaccagagctgcctctgcctggcatggagccccccgtgctgtggccgccctgagcagcagcggctagcggctggctacggtgacggctccctgcgcatcttcagcgtctcccgcacggccatggagctcaagatgcacccccacccggtggcgctgaccactgttgccttctccaccgatggtcagactgtcctctctggagacaaggatgggctcgtggctgtgagccacccctgcacagggacaaccttccgtgtgctgagtgaccaccagggcgccccaatctctaccatctgtgtcacgtgcaaagagtgtgaagacttaggggtggagggcacagacctatggctggctgccagtggggaccagcgggtcagcgtctgtgcctccgactgtctgcggaaccactgtgagcttgtggactggttgagtttcccaatgcctgccaccacggagactcagggccacctgccacctccctcgctgcttctgcccttgggatggggcgctctgatgtacgtgggccccggtgtttacaaggaggtgatcatctacaacctctgccagaagcaggtggtggagaagataccactgcccttttttgccatgtccctgagcctgtcccccgggacccacctcctggctgttggctttgctgagtgcatgctgaggctggtagactgtgccatggggactgcccaagactttgccggccacgacaacgcagtgcacctgtgcaggtttacaccgtccgccaggctgctcttcacggccgcccgcaacgagatccttgtgtgggaggtccccggcctctgagatgcagcagggactgtggtggtgggcatcacgcctggtcatgccaggcacctggacacaggcttggcagaggcgccaggttgtcaatggcctcatgctgggacaggccaggattcacgtaaatcgcctggagcaagctgttgtaaatttggcgccctgtgaatactttcatacctgttgcccttttgcctaagaaatctttaatgtttctatcttgtaataaacatgggcatttattgc

SEQ ID NO: 461 - DNA, 663 bp, Homo sapiens
ctcttggctggacatcattaagaaagttctggaaactgtgtttgtttgatgctggttcattggacttttcaaattgttttgtttctgtgtccctaccagacacaaagatgaagtgtgccagctggttcccccaagccagctcatgctgctgaccactgactcagctctgaccttcacatttgctctgaagcaagtgcgttcagctgctggggcagtgatatcacatagtacatatattatttccttagtttatttccaaactggtattttaaatagacacttcgaactttgggctactctgtttaaatttgccactttctggactggaccttagtactgtaaattctttttaaagaataataatgttaccaactgctgagatttttatgtattttgtgactttgtaacaactgctattgtaataagtgtcatcttgtgggcattatacaaaggcatattataaaataataatgatatttttgtatagaagagtcaactgttcagatgtaagatgttgaaaaatgttaaaatctaaagagtaatttatcctagtggtaatggttatatgtatttgtacagtttaaattaatgtctcaaagctgtgcagtcttttgttactgggaaacttttaaactctgaataggcattaaaaaaaatatggct

SEQ ID NO: 462 - DNA, 709 bp, Homo sapiens
  misc_feature 527: n = a,c,t, or g
gagctcctgagcgagatggcggcggcggtgcaggagagcgcgcgaattcctgatgaatatctgttatcgctgaagtttctctttggctcatcagccacccaggccttggacctagttgatcgacagtccatcaccttaatctcatcacccagtggaaggcgtgtttaccaggtccttggaagttccagtaaaacatacacatgtttggcttcttgtcattactgttcatgtcctgcatttgcattctcagtgctacggaagagtgacagcatcctgtgcaagcatctcttggcagtttacctgagtcaggttatgaggacctgtcagcagctaagtgtctctgacaagcagttgactgacatattattgatggagaagaaacaagaagcataaaaggtacagattgagcatcattctttcaaaatagaatcctgtcaagaaatgcattgaaagcgtcataattcacatggaaaagaggtgaaatggatcttcagacacttcatgttactgtcccttttccctccagnactgcaggaggtgctgtgggttggacccgtgggctgtggagggtttgtgtatgatgagaagccctgtacagtcttgtcaagaaataccctgagccagtctctgagacgcttcggtaaaaaatgtccctggatggaatcaagattttaaattcaaataaagcctaatatcatgttgtgtccac

SEQ ID NO: 463 - DNA, 309 bp, Homo sapiens
gttttgctggcttgaagacaaatggtcttagaattcattgagacccatagcttcatatggctgctccagccccacttcttagcattcttactcctcttctggggctaatgtcagcatctatagacaatagactattaaaaaatcaccttttaaacaagaaacggaaggcatttgatgcagaatttttgcatgacaacatagaaataatttaaaaatagtgtttgttctgaatgttggtagacccttcatagctttgttacaatgaaaccttgaactgaaaatatttaataaaataacctttaaacagtc

SEQ ID NO: 464 - DNA, 324 bp, Homo sapiens
gatcagagaagaggctactgggggagaattcagtgcccccttcgccctctagggagcagacctccactgccattgtcctgtgagctgccaaagaccccacggggtgcccgcatgtccctgtctagggcagcccagggcccccactcctggctcctcacacttgcctcccctatggccgctctccagaccctcctcctttcttctccccacatccgcacctgctgttcccactctggggttctcaagtccatgaacagatattgttgcattttccacaatgctgattaaacataataaacaatccagaaaagcagttttgcccag

SEQ ID NO: 465 - DNA, 2140 bp, Homo sapiens
gatttaattcgctccttaacaacatggaactcattagaaagatctatagcactctggctggcaccaggaaagatgttgaagtgactaaggaggagtttgttctggcagctcagaaatttggtcaggttacacccatggaagttgacatcttgtttcagttagcagatttatatgagccaaggggacgtatgaccttagcagacattgaacggattgctcctctggaagagggaactctgccctttaacttggctgaggcccagaggcagaaggcctcaggtgattcagctcgaccagttcttctacaagttgcagagtcggcctacaggtttggtctgggttctgttgctggagctgttggagccactgctgtgtatcctatcgatcttgtaaaaactcgaatgcagaaccaacgatcaactggctcttttgtgggagaactcatgtataaaaacagctttgactgttttaagaaagtgctacgctatgaaggcttctttggactgtatagaggtctgttgccacagttgttgggagttgccccagagaaggccataaaacttacagtgaacgattttgtgagggataaatttatgcacaaagatggttcggtcccacttgcagcagaaattcttgctggaggctgcgctggaggctcccaggtgattttcacaaatcctttagaaatcgtcaagatccgtttgcaagtggcaggagaaatcaccactggtcctcgagtcagtgctctgtctgtcgtgcgggacctggggttttttgggatctacaagggtgccaaagcatgctttctgcgggacattcctttctcggccatctactttccgtgctatgctcatgtgaaggcttcctttgcaaatgaagatgggcaggttagcccaggaagcctgctcttagctggtgccatagctggtatgcctgcagcatctttagtgacccctgctgatgttatcaagacgagattacaggtggctgcccgggctggccaaaccacttacagcggagtgatagactgctttagaaagatactgcgtgaagaaggaccaaaagctctgtggaagggagctggtgctcgtgtatttcgatcctcaccccagtttggtgtaactttgctgacttacgaattgctacagcgatggttctacattgattttggaggagtaaaacccatgggatcagagccagttcctaaatccaggatcaacctgcctgccccgaatcctgatcacgttgggggctacaaactggcagttgctacatttgcagggattgaaaacaaatttggactttacctacctctcttcaagccatcagtatctacctcaaaggctattggtggaggcccataggaagatcagccctgggatagtgctgtctttttgtgggtactgcagtaaagaacatccctcctgggaatgaagcaatgcttcatcccttttacgtccatctcttgtttaaattcaagtccaggcttttttatcatgtgaaatcattcattttctgggtgttttcttaaccagatcattgtgaaattattcataattattatttggccctctgcccagaaacctttgtttgcatctgaaaattgatgggatttggtcaacactaacatgatttggggaaaggagcaagtcagaatagaaattagtactcccctccttgaactaggattgtagtcccaaagaggctactgtaaggcaatcatggtgctcagagcagtgtttcgtgtgtgttttaaactggtaggaaactaggtgcatatttataaaaataaaaaacactgggagaaatgaaaaaatatatatcaaatatattcagcctggcttcaaattgtaagcatgcacaaattctgtctctggattatattatgaagcttttatgtgaaacatgtttctttgtaatgaaaaccacattggagatgtttagtaatcatattgttactggtaccaagactactagggaaatgcctttgtactttagggaagtacttttggcattttactgtacagacagaaaaaactgagatgtagcccctctcctggaagtgctaattttgaaaaactgctcatatgatgtacatgtactgattactgcctattttaataaacactcttgaaaaatg

SEQ ID NO: 466 - DNA, 2510 bp, Homo sapiens
cagctaattttttgtatttctagtagagatggggtttcaccatgttagccaagatggtctcgatctcctgaccttgtgatccgcccgcctcggcctcccaaagtgctgggattacaggcatgagccactgcgcccggcctgcactgtgggttttaaaacacgcatagagtgtggcagccatggtgcccaggccatgcagagagacatggggacgtgggaaggttcttgtatcaccgtggagtggtgggtttcacctgcaggagccgggggtccacggggacgtgcactgtagaccccagagcagccgtggcaccgacgtccttgcgggttgttcagagacgccagagtgtggggggattcagtgacttggggtctcatgggctcgttggctgatttctgtctggagcacgcgccggctctctcccattttctactccgttgagaccaaattaaaatggaaccggccacaaagcaagtggggcttcgtgtccacttctccgaggctggggccgggggcatcgccttcctgggagtgcagaggaacgcgggcagagtgtgtgccatggccttggccagaggcgatggagccaacgcaggaggctgcacctgccttccccgaagtccaccgacacctgtgaggaaccagagaggagacgagagcttcatccagtgcggctgcgaacagccgggattccaccgaggcaggtgaggaagacccagtgatctgggagcctcccctaggagagcgaagcctgaggagtgggtggccggggttgggacccagagggtgaccgcaaacctgctctgaccagacgagtgggtggccggggtagggacccagagggtgaccgcaaacctgctgtgaccggacgcatggcaggagcagggagggcgtgggaaccagggtgcctccactggcctctggcagagccggagctgctgacgccaggacccgtggcactgaacctggacacatggctgaatgccagggcccatggcactggactcagacggatggctgagtggggagggattggtagaggccaatgcccagctcttcccatctgaagacaggcatgaggaaccacggcaagctcgagctctggaggctggaacaggtgcaaggctgggtccatctctgttctccatggacctaggaggagatgtcgcggttcctgaatctgaaatggacataacaacattcctgctctgaggagctcccgggaagagcacataagccgaccgaagcccctgtgcctggcgccgaacgtgctctcaacccacacccggctcttgacacgccctcaacccactcgctggcagggtcaagccacccccgagtctgcctcagcagagtccccaaacctgaagctggcagatttgaggctaaaaaactaaagacagagctccaggccggaggccaactgtccttccccaggaacgagaagaggtctgtggtccggatgagcagaacaagggccggaggccccttgcagggagcggagcggacagaggttctgttggagccgcagctcagagcccctgagggaccccctactctggggccctggcccttaccacagagccttgtgtgtgttaggaccgcctgcccaagaccggcagagccagggaatctgcatgtttaacatggcctcagattccacgtggggtgggttatggtgggggagaccagagaggaatccttgcttcacagttcgaagtcggaagacaacgttagtgctacacagccggggagcagcaagccctgcttgtcatgcagagacccggggctgcgtttcgggaatcaggggagagaagtctaaacggggctgtctccagggagaacgatggatgagaaggtggggccgctcttgtttgtagcagccttgtaaaactggcatttttgtttttgagacagagtctcgctctgttgcccaggctggagtgcagtggtgtaatctcagctcattgtaacctctgcctcctgggttcaagtgattctcctgcctcagcctcccgagtagctgggattacaggcacctgccaccacacccggctaatttttgtatttttagtagagacggggtttcactaagggaggagaccactcctcatattgtcttatgcccgatttctgcctccaaagaaagaaaaaaaaaaaactaaaaggcagaaatgaaatccacaagcagacagcccggcgccgtgtcctgggcctcgtagttaaagattgacccctgacctaatcggttatgttatctatagattacagacattgtatggaaaagcactgtgacaatccctgtcctgttctgttctgttctaactaccggagcatgcagcccccagtcacgtacccactgcttgctcaatcgatcacgaccctctcatgcacacccccttagagttgtgagcccttaaaagggacaggaattgctcactcggggagctcagctcttgagacaggagtcttgctgacgcccccagccgaataaaccccttccttcttt

SEQ ID NO: 467 - DNA, 1160 bp, Homo sapiens
cctgtctcttagaaaaaaataggagtttgtacacaatcatcactgttgttcaccttccattggcaagaactcagccacacctggccatttggtgttgggtgtgggaatgctttcgattctggctgtccaaatggcactttgttgaggtctttctataactggtggtcctctccctctctttggccctccaggtgtggttacagaggaggctacatggaggtgatcaacctgcaccctgagatcaagggccagctggtgaagctgctgtcggtgcgcctgtgccccccagtgtctgggcaggccgccatggacattgtcgtgaaccccccggtggcaggagaggagtcctttgagcaattcagccgagagaaggagtcggtcctgggtaatctggccaaaaaagcaaagctgacggaagacctgtttaaccaagtcccaggaattcactgcaaccccttgcagggggccatgtacgccttccctcggatcttcattcctgccaaagctgtggaggctgctcaggcccatcaaatggctccagacatgttctactgcatgaagctcctggaggagactggcatctgtgtcgtgcccggcagtggctttgggcagagggaaggcacttaccacttcaggatgactatcctccctccagtggagaagctgaaaacggtgctgcagaaggtgaaagacttccacatcaacttcctggagaagtacgcgtgaggacgcctgagccccagcgggagacctgtccttggctcttcctcccaatgcccgtcaggctgaactcgcctcccccgtgactctgcctcgggcctcgcagaggccgctggtcacttcgtcatcattttgcccctggagacgtctttctttgtgccttgatgttgagagcgcctctcttttgagcaaacaagcattctatatgcaaccagagtagaggggacctgctcagcaggtgtgaccagggttctctgaatctgttattgtttttgcttctggaaagttcatttggggtttacaacaactaggatgtgttgggtgagatgtttcagatctggagaaatgagcaggtgtcgggaaatgtgtgacttaaccgtggtgagggctggaaatccaaactcaccaccatgatctgtgaaataaagcccttagcggtg

SEQ ID NO: 468 - DNA, 1866 bp, Homo sapiens
ccaaggactcatcccaaagcctgatgaagatgacgccaacagactcggggagaaggtgatcctgcgggagcaggtgaaggaactcttcaacgagaaatacggtgaggccctgggcctgaaccggccggtgctggtcccttataaactaatccgggacagcccagacgccgtggaggtcacgggtctgcctgatgacatccccttccggaaccccaacacgtacgacatccaccggctggagaagatcctgaaggcccgagagcatgtccgcatggtcatcattaaccagctccaaccctttgcagaaatctgcaatgatgccaaggtgccagccaaagacagcagcattcccaagcgcaagagaaagcgggtctcggaaggaaattccgtctcctcttcctcctcgtcttcctcttcctcgtcctctaacccggattcagtggcatcggccaaccagatctcactcgtggtaaagttgcaccgatttggactccggcactcatctctgtggccctcacccctctgtctggcagggccgtctactctgggatgtgggcccaggggacggggaggcactgggctttgagtggggaccttccggcctcgggggttatagatgcatccacctgtctcacccaagaggtagcccatccttctcgtggggtactcacaggcactcaggcaggaattcacatcctcctgggcagatgggccggctgaggtcacctgcccacacccttagccgcaccagagctggagacatgaaaagacatggctggcgggtgcagtggctcacgcctgtaatcccagcactttggcaggtcaagtcgggtggatcacctgaggtcaggagtttgagaccaggctgaccaacacggggaaaccccatctctactaaaaatacaaaattagccgggcaaagtggggcatagtggctcatgcctgtaatcccagctacttggaaggctgagatagaagattcgcttgaacctggaggcagaggttgcaatgagccgaggtcgcgccattgcactgcagcctggcaacaagagtgaaacactgtctcagaaaaaaaaattagccaggcatggtggcacgtgcctgtggtcgcagctacttggaggctggggcaggaggatcatttgagcccaaggggattgaggctgcagtgagccaagatcgtcccattgcactccagcctgggcaagagaacgagactccatctcaaaaataaataaataggctgggtgtggtggctcacgcctgtaatcctagcactttgggaggccgaggcaggcggatcacttgaggctcaggagttcaagaccagcctggccaacatggcaaaaccccgtctctactaaaaatagaaaaattagccgggcatggtggcgggcgcctataatcccagctactcgggaggctgaggcaggagactcgcttgaacccgcggggccaaggttgcagtgagccgagattgcatcactgcactccagcctgggcagaagagtgaaactccatctcaaaaaaataaaaaatataaataaatagcctctgagaaagctcttccaaaagcagaactaagcattttgggtttgttccgcatcacctggagtcctaatccagtccctttgtccctctctctagcaatggccaatgtacatggtggactatgccggcctgaacgtgcagctcccgggacctcttaattactagacctcagtactgaatcaggacctcactcagaaagactaaaggaaatgtaatttatgtacaaaatgtatattcggatatgtatcgatgccttttagtttttccaatgatttttacactatatacctgccaccaaggcctttttaaataagt

SEQ ID NO: 469 - DNA, 1825 bp, Homo sapiens
ctgatgccacctccgcgtacccctacctcctcctgtatgagagccgccagaggcgctacctcggctcttcgccggagggcagtgggttctgcagcaaggaccgatttgtggcttacccctgtgctgtgggccagacggccttctcctctgggaggcactactgggaggtgggcatgaacatcaccggggacgcgttgtgggccctgggtgtgtgcagggacaacgtgagccggaaagacagggtccccaagtgccccgaaaacggcttctgggtggtgcagctgtccaaggggaccaagtacttatccaccttctctgccctaaccccggtcatgctgatggagcctcccagccacatgggcatcttcctggacttcgaagccggggaagtgtccttctacagtgtaagcgatgggtcccacctgcacacctactcccaggccaccttcccaggccccctgcagcctttcttctgcctgggggctccgaagtctggtcagatggtcatctccacagtgaccatgtgggtgaaaggatagacacagaccgggggactcgggcactgctcctggctctgcagaaggtgtgggccttctgcttactgcaggccacctgccatggttctctggcatcacgctggcagccattagacacacaggggggtttctcaaattctaaatataattgtgattagaactgtcaaacattaagagggtatactgacagatgcttcctagaggaaacttttgaaagcccctgcgttctgagtggaccgatttctaaatccatacctacacaccaggaacagcgtggtcacgttttttttagccatgcccccacccccactttggaatgacaggaatctgtggctcccaccccccccaggggtttaggttactctgtcaaagaagtagaaatatcctatggtggggaggagcgggggtggttgctgtgtcatggatggtcccaagctgcccataaaaatgtcctatgcatcctattgggtccttcgatgggggaaaatgggaaaggctgaacccgtaaaaagcctcaagctgccacccccatcccgttcgatccccaaagttgcacgaacaggggcaaaatccaaagagattaagatttatgtaggggcctcttttccacagcgcccttaccttttccaaggaaccccccacccacccctgcagggtcaagcactttaacagcctgtgtcagtcactatcaaggcagaattccagagtaagcgtactcctacctcgacaaatccggagtgtctgcgcgaggggctgcctggaacagcatgcccctttggagtggttcccgcagaaagaatgtgggcctcctggagagctggtcctggagggatgcccccgtcccatcccccaactccaatcattctgaccttggcctgccaaggctgtgagggccgggccttccgaggatacccgccctgggaagcacgggctgagggggtgaggacgcactaggggtatggcgaaaggctccaatgccccaagctgcggactcccttaatccttgcagttgcttccgtgtgccccgcctgagtgcccatccctcttgcctgcccctgctcattcctccctgcgccccgccccctgtccccatccctcccctgcgcccccccccctgtccccctccctcccctgcgcctgggtcctccccggggggggggttaagggcctggccccaagagccgggggggtggtggcgccgggtcggcgggtgggggctctccatttccgtcccgcccgcgggccgcgtggctggcggcggccaatcggaggcaaaagcgggttgttcc

SEQ ID NO: 470 - DNA, 417 bp, Homo sapiens
aagagcgagactgtgtctcaaaaacaaacaaacaacaacaacaaaaggaaagaatcagactggcttgggactctgctgtcccctgcccgtgacctcccaaaagcgtgtgttagagactgacctgcctagtgcgtcagtggagggggcactttggagaggggcttggatcgtgaggccccgccctcgtgaatggctcagtgccttgtgaaagggcttgatggagggagtttggtcccttttccccttttgtctctctgctgtgtgaggacaccatgttcctcccctctggaggatgctgtaacaagctgtcatctcgggaggagacaccaggccctgaccagacgctgaacatgccagcaccttcatcttggactttccagcccccagaactgtgagaaataaatttctgttctttat

SEQ ID NO: 471 - DNA, 1080 bp, Homo sapiens
tgatcagaaggtactttcaaaagagggctttccagggctcagctcccaaccagctgttaggaccccacccttttgcctttattgtcgacgtgactcaccagacgtcggggagagagagcagtcagaccgagctttctgctaacatggggaggtagcaggcactggcatagcacggtagtggtttggggaggtttccgcagtctgctccccacccctgcctcggaagaataaagagaatgtagttccctactcaggctttcgtagtgattagcttactaaggaactgaaaatgggccccttgtacaagctgagctgccccggagggagggaggagttccctgggcttctggcacctgtttctaggcctaaccattagtacttactgtgcagggaaccaaaccaaggtctgagaaatgcggacaccccgagcgagcaccccaaagtgcacaaagctgagtaaaaagctgcccccttcaaacagaactagactcagttttcaattccatcctaaaactccttttaaccaagcttagcttctcaaaggcctaaccaagccttggcaccgccagatcctttctgtaggctaattcctcttgcccaacggcatatggagtgtccttattgctaaaaaggattccgtctccttcaaagaagttttatttttggtccagagtacttgttttcccgatgtgtccagccagctccgcagcagcttttcaaaatgcactatgcctgattgctgatcgtgttttaactttttcttttcctgtttttattttggtattaagtcgttgcctttatttgtaaagctgttataaatatatattatataaatatattaaaaaggaaaatgtttcagatgtttatttgtataattacttgattcacacagtgagaaaaaatgaatgtattcctgtttttgaagagaagaataattttttttttctctagggagaggtacagtgtttatattttggagccttcctgaaggtgtaaaattgtaaatatttttatctatgagtaaatgttaagtagttgttttaaaatacttaataaaataattcttttcctgtggaagag

SEQ ID NO: 472 - DNA, 1266 bp, Homo sapiens
gagcgattagcgccaacagctcagagaaaacgtgacgaaaaccagtctgtaaaacccgagcctgggagaggggcttcggtgcgcggggggaatttgcagacgctccctgctggcggagatttcctgacctgtccttcggcgcgggactttcggcgggtcccggccgggcagacccaagtgccggcggcggagactgcagtggagccagtaccggctgtagtggccggggccgtggcgggagagtcatgtcagagccgcagccgcggggcgcagagcgcgatctctaccgggacacgtgggtgcgatacctgggctatgccaatgaggtgggcgaggctttccgctctcttgtgccagcggcggtggtgtggctgagctatggcgtggccagctcctacgtgctggcggatgccattgacaaaggcaagaaggctggagaggtgcccagccctgaagcaggccgcagcgccagggtgaccgtggctgtggtggacacctttgtatggcaggctctagcctctgtggccattccgggcttcaccatcaaccgcgtgtgtgctgcctctctctatgtcctgggcactgccacccgctggcccctggctgtccgcaagtggaccaccaccgcgcttgggctgttgaccatccccatcattatccaccccattgacaggtcggtggatttcctcctggactccagcctgcgcaagctctacccaacagtggggaagcccagctcctcctgatcatactctggtacctggcctgtgcatcggcctcctgcttcatgtcaacctcctactcctgccagggaatgtggacacctggctccctggtgtccaaagaccctggcacctgggtgggtttgagctggacagaagcttagagacaaaggcttcaagaagcagtggctgcagggagtcacagaagggcaggacctgaacgctgtctgcttccctggaatccaagatgctgagtggaagtggaccctgggtgggcccggccctgtctttttcaggaaaattacatcctcccatggaggatgagagactgaggctcagggagggcaaggaataggcccaagatcacttggcaagctgggcacccaggacccccaggtgcttgacagagtcaccccatggtggtatggctgaacaaggagcggcagacaactcagggagaaactcaggagtgcagtaccagggacacctcaggacagattctctggccaggcccttccctgacccaataaatcctgaagaggtt

SEQ ID NO: 473 - DNA, 2748 bp, Homo sapiens
gaactccaccttcagggccccatccacagaggttacctcttccaagaggtcagggaggaggctctcctcctgactcccataggcttcctagttaattatttcttttagtgtctcagggtaagggaaaggctaggtacctaccatgtatgtgcttattgttttaattctcatcactctttggagatgggaatttgtatccccttctacagatggagaagctgaggctcagagggttgaatgggctccccaggcttacacagctcgtgagacacacataagcaccctggtcagagtgatgtgtggcgctcaaggtccatgcagtctctttcctctgggagtttgactagcccagctctggggtccccatgtaagggcaggggcagggtggactgggctcctctcgaacccctctttggctgcccctgccagagccggccaggttgcagcgcggacacactcgcaggtcgctgtggccccagcctcgcctgacagaatgagcggctcggacgggggactggaggaggagccagagctcagcatcaccctcacgctgcggatgctgatgcacgggaaggaagtgggcagcatcatcgggaagaagggcgagactgtaaagcgaatccgggagcagagcagtgcccggatcaccatctccgagggctcctgccctgaacgcatcaccaccatcaccgggtctacagcagctgtcttccatgcagtctccatgattgctttcaaactggatgaggacctttgtgctgctcctgcaaatggtggaaatgtctccaggcctccagtgaccctgcgccttgtcatccctgccagtcaagtgtggctcactgattgggaaggctggcaccaagatcaaggagatccgagagactacgggtgcccaggtacaggtggcaggggacctgctccccaactccacagagcgagctgttacggtatctggggtgcctgatgccatcatcctgtgtgtgcgccagatctgcgctgttatcctggagtccccacccaaaggagccactatcccctaccatccgagcctctccctaggtactgttcttctctctgccaaccagggcttctctgtccagggtcagtatggggctgtgaccccagctgaggtcaccaagctccagcagctctcaagccatgcggtcccctttgccacacccagcgtggtgccaggactggatcccggcacacagaccagctcacaggagttcttggttcccaacgatttgattggctgtgtgatcgggcgccagggcagcaagatcagcgagatccggcagatgtcaggggcacatatcaagatcgggaaccaagcagagggcgctggggagcggcatgtcaccatcactggctctccggtctccatcgccctggcccagtacctcatcactgcctggtgagcgcgggctgggcggcagtgggggagcaggtcacggttctcatgtgcccaagaaaggcaggggtggggagaggaagctggcctcctctctctgtctgggcccgacctctgcctctcctaaccctactccaattccccatggtctttgcctaattcaccctctgttgccccatctcccccctctatatccacctctcattctccattgctgtgtcttttccctgggtctctggccaccccatttctccctgcacctcgtgctatatctgcttgtcctttcttcccttcctcttccacctttcccatcttccccttattgttctctgttcactacctctctcttgcctttcatctaatctcatgcccatctctgccctcattgcccctctctcactcccactttcccctttgtctcccctctatatccctctctccagtctagagacggccaagtctacctctggggggacgcccagctcggcccccgcagacctgcctgcccccttctcgccacccctgacggccctgcccacagctccccctggcctgctgggcacaccctatgccatctccctctccaacttcatcggcctcaagcccatgcccttcttggctttaccacctgcttccccagggccgccgccgggcttggcggcctacactgccaagatggcagcagctaatgggagcaagaaggctgagcggcagaaattctccccctactgaggccagctgaggtacaggcaggggcaggcaggaccaccagcagggggctgcctctgcaccctacccgcccaaggagactccaccctggggtcccaaacgccgctaacgcccagacgcatggatgcaccccctaccctgcctccatctatgggagttctttctctcagagtgggggcagtttctggcccaggggtctgagctgcggcagccccagggcagggggccctacctcctcagctctgtgcttggatacagggagcagccaggagactccctagtgcccccaccatggcgggtgtcactcacgcactccccatcccttagggcttcctggcctactgcatccttgtgggagtcagggaggagggcccgttgggtagctggggccaggcttctctccccaccacctgcagatttcttgctgcttccactgatacccttttgactggaatgaactggctgggcttgtcagggggcaccccaaagagggggcactgccaggtagctgggggagtggcatggggcaggggcccagttctcagcagcagacactctgtacagttttttcaatccctgtttttgaataaatattctcagcgacc

SEQ ID NO: 474 - DNA, 755 bp, Homo sapiens
ggcctgctgacccagggtgataagatcactgctgatggacttcaggaggtgtttgagatccaatgtctttggccattttatcctgattcgggaactggagcctctcctctgtcacagtgacaatccatctcagctcatctggacatcatctcgcagtgcaaggaaatctaatttcagcctcgaggacttccagcacagcaaaggcaaggaaccctacagctcttccaaatatgccactgaccttttgagtgtggctttgaacaggaacttcaaccagcagggtctctattccaatgtggcctgtccaggtacagcattgaccaatttgacatatggaattctgcctccgtttatatggacgctgttgatgccggcaatattgctacttcgcttttttgcaaatgcattcactttgacaccatataatggaacagaagctctggtatggcttttccaccaaaagcctgaatctctcaatcctctgatcaaatatctgagtgccaccactggctttggaagaaattatattatgacccagaagatggacctagatgaagacactgctgaaaaattttatcaaaagttactggaactggaaaagcacattagggtcactattcaaaaaacagataatcaggccaggctcagtggctcatgcctataattccagcactttgggaggccaaggcagaaggatcacttgagaccaggagttcaagaccagcctgagaaacatagtgagcccttgtctctac

SEQ ID NO: 475 - DNA, 630 bp, Homo sapiens
gtttttattttttaacaagatttgtgaactgaatatcatgaaccatgttttgatacccctttttcacgttgtgccaacggaatagggtgtttgatatttcttcatatgttaaggagatgcttcaaaatgtcaattgctttaaacttaaattacctctcaagagaccaaggtacatttacctcattgtgtatataatgtttaatatttgtcagagcattctccaggtttgcagttttatttctataaagtatgggtattatgttgctcagttactcaaatggtactgtattgtttatatttgtaccccaaataacatcgtctgtactttctgttttctgtattgtatttgtgcaggattctttaggctttatcagtgtaatctctgccttttaagatatgtacagaaaatgtccatataaatttccattgaagtcgaatgatactgagaagcctgtaaagaggagaaaaaaacataagctgtgtttccccataagtttttttaaattgtatattgtatttgtagtaatattccaaaagaatgtaaataggaaatagaagagtgatgcttatgttaagtcctaacactacagtagaagaatggaagcagtgcaaataaattacatttttccc

SEQ ID NO: 476 - DNA, 1143 bp, Homo sapiens
cggcggggccagctgcgttctgagcctgggcgcagctgccatctgctctgggaagcaccagggtgtccccgccgccctcagctcgaagtcagccaccatggaggcgcaggcacaaggtttgttggagactgaaccgttgcaaggaacagacgaagatgcagtagccagtgctgacttctctagcatgctctctgaggaggaaaaggaagagttaaaagcagagttagttcagctagaagacgaaattacaacactacgacaagttttgtcagcgaaagaaaggcatctagttgagataaaacaaaaactcggcatgaacctgatgaatgaattaaaacagaacttcagcaaaagctggcatgacatgcagactaccactgcctacaagaaaacacatgaaaccctgagtcacgcagggcaaaaggcaactgcagctttcagcaacgttggaacggccatcagcaagaagttcggagacatgagacgaaagtaggcggtacgaaccctaatggaggcagttttgaggaggtcctcagctccacggcccatgccagtgcccagagcttggcaggaggctcccggcggaccaaggaggaggagctgcagtgctaagtccagccagcgtgcagctgcatccagaaaccggccactacccagcccatctctgcctgtgcttatccagataagaagaccaaattcccgctgggaaaaacccaggccttgacattgttattcaaatggcccctccagaaagtttaatgatttccatttgtatttgtgttgatgatggaccacttgaccatcacatttcagtattcatagatgactgtcacattttaaaatgttcccacttgagcaggtacacaactggtcataattcctgtctgtgtaattcgatgtatattttcccaaacatgtagctattgtttgctttgatttttgcttggcctcctttatgatgtgcatgtccttgaaggctgaatgaacagtccctttcagttcagcagatcaacaggatggagctcttcatgactgtctccagcaataggatgatttactataaatttcatccaactacttgtgatctctctcacctacatcaattatgtatgttaatttcagcaattaaaagaattgattttt

SEQ ID NO: 477 - DNA, 2260 bp, Homo sapiens
tgcagcgtagcccgagtcggtcagcgccggaggacctcagcagccatgtcgaagccccatagtgaagccgggactgccttcattcagacccagcagctgcacgcagccatggctgacacattcctggagcacatgtgccgcctggacattgattcaccacccatcacagcccggaacactggcatcatctgtaccattggcccagcttcccgatcagtggagacgttgaaggagatgattaagtctggaatgaatgtggctcgtctgaacttctctcatggaactcatgagtaccatgcggagaccatcaagaatgtgcgcacagccacggaaagctttgcttctgaccccatcctctaccggcccgttgctgtggctctagacactaaaggacctgagatccgaactgggctcatcaagggcagcggcactgcagaggtggagctgaagaagggagccactctcaaaatcacgctggataacgcctacatggaaaagtgtgacgagaacatcctgtggctggactacaagaacatctgcaaggtggtggaagtgggcagcaagatctacgtggatgatgggcttatttctctccaggtgaagcagaaaggtgccgacttcctggtgacggaggtggaaaatggtggctccttgggcagcaagaagggtgtgaaccttcctggggctgctgtggacttgcctgctgtgtcggagaaggacatccaggatctgaagtttggggtcgagcaggatgttgatatggtgtttgcgtcattcatccgcaaggcatctgatgtccatgaagttaggaaggtcctgggagagaagggaaagaacatcaagattatcagcaaaatcgagaatcatgagggggttcggaggtttgatgaaatcctggaggccagtgatgggatcatggtggctcgtggtgatctaggcattgagattcctgcagagaaggtcttccttgctcagaagatgatgattggacggtgcaaccgagctgggaagcctgtcatctgtgctactcagatgctggagagcatgatcaagaagccccgccccactcgggctgaaggcagtgatgtggccaatgcagtcctggatggagccgactgcatcatgctgtctggagaaacagccaaaggggactatcctctggaggctgtgcgcatgcagcacctgattgcccgtgaggcagaggctgccatctaccacttgcaattatttgaggaactccgccgcctggcgcccattaccagcgaccccacagaagccaccgccgtgggtgccgtggaggcctcacttcaagtgctgcagtggggccataatcgtcctcaccaagtctggcaggtctgctcaccaggtggccagataccgcccacgtgcccccatcattgctgtgacccggaatccccagacagctcgtcaggcccacctgtaccgtggcatcttccctgtgctgtgcaaggacccagtccaggaggcctgggctgaggacgtggacctccgggtgaactttgccatgaatgttggcaaggcccgaggcttcttcaagaagggagatgtggtcattgtgctgaccggatggcgccctggctccggcttcaccaacaccatgcgtgttgttcctgtgccgtgatggaccccagagcccctcctccagcccctgtcccacccccttcccccagcccatccattaggccagcaacgcttgtagacctcactctgggctgtaacgtggcactggtaggttgggacaccagggaagaagatcaacgcctcactgaaacatggctgtgtttgcagcctgctctagtgggacagcccagagcctggctgcccatcatgtggccccacccaatcaagggaagaaggaggaatgctggactggaggcccctggagccagatggcaagagggtgacagcttcctttcctgtgtgtactctgtccagttcctttagaaaaaatggatgcccagaggactcccaaccctggcttggggtcaagaaacagccagcaagagttaggggccttagggcactgggctgttgttccattgaagccgactctggccctggcccttacttgcttctctagctctctaggcctctccagtttgcacctgtccccaccctccactcagctgtcctgcagcaaacactccaccctccaccttccattttcccccactactgcagcacctccaggcctgttgctatagagcctacctgtatgtcaataaacaacagctgaagc

SEQ ID NO: 478 - DNA, 995 bp, Homo sapiens
  misc_feature 624,736,790: n = a,c,t, or g
tacactcaaacgtggcgtggacagtggaagatccagtggacagtgctcctcccgggcagagaaagaaggagcaatggtacgctggcatcaacccctcggacggtatcaactcagaggtcctggaagccatacgggtgacccgtcacaagaacgccatggcagagcgctgggaatcccgcatctacgccagtgaggaggatgactgagcctcgggatggggcgcccaccccctgccctgccctgaccctcgtgggaactgccaagaccatcgccaagcccccaccctaggaaatgggtcctaggtccaggatccaagaaccacagctcatctgccaacaatcccaccatgggcacatttgggactgttgggtttttcgtttccgtttctatcttcctttagaaatgtttctgcctttggggtctaaagcttttggggatgaaatgggacccctgctgattctttctgcttctaagactttgccaaatgccctgggtctaagaaagaaagagacccgcttcctccactttcaggtgtaatttgcttccgctagtctgagggcagagggaccggtcaaaagagggtggcacagatcgcagcactttaaggggttgcgggtttgaggnaggaaacactcagctcctccctctgagaagtcccaagctgagaggggagacctgcccctttccaaccctgggaaaccatccagtctgagggaggaggccaaactcccagtgntgggggtccctgtgaagccctcaaacccttcaccttggtgcacccagccacacntggtggacacaaagctctcacatcgataggatcccatgaggatggtccccttcacctgggagaaaagtgacccagtttaggagctggaggggggtctttgtcccccacccccaaactgccctgaaataaacctggagtgagctgcccaaaaaaaaaaaaaaaaaaaaaaaaaaaaaaaaaaaaaaaaaaaaaaaaaaaaaaaaag

SEQ ID NO: 479 - DNA, 2803 bp, Homo sapiens
tgttctccttgattgtttggcatcagaatggcagtaatgtgtgtggctggcttattcttcatccctgtagctggcctcacgggatttcacgtggttctggtggccaggggacgcacaaccaatgaacaggttacgggtaaattccggggaggtgtgaaccccttcaccaatggctgctgtaacaatgtcagccgtgttctctgcagttctccagcacccaggtatttggggagaccaaagaaagagaagacaattgtaatcagacctcccttccttcgaccagaagtttcagatgggcagataactgtgaagatcatggataatggcatccagggagagctgaggagaacaaagtctaagggaagcctggagataacagagagccagtctgcagatgctgaacctccacctcctcctaagccagacctgagccgttacacaaggttgcgaacacacctcggcttggctactaatgaggttgagtcgtggggacagcttgaaggagccaacctcaattgcagagagcagccgtcaccccagctaccgctcagagcccagcttggaaccagagagcttccgttctcctacctttggcaaaagttttcacttcgatccactatccagtggctcacgctcctccagcctcaagtcagcccagggcacaggctttgagctgggccagttgcaatccattcgttcagagggcaccacctccacctcctataagagcctggccaaccagacacgcaatggaagcctatcttatgacagcttgctcacaccttcagacagccctgattttgagtcagtgcaggcagggcctgagccagacccacctttaggctatacctctcccttcctgtcagccaggctggcccagcaacgggaagctgagaggcacccacgtttggtgccaactggcccaacacaccgagagccctcaccagtccgttacgacaatctgtcgcgccacattgtggcctctctccaggaacgagagaagttgctgcgccagtcacccccactcccgggccgtgaggaagaaccaggcttgggggactcaggcattcagtcaacaccaggctcgggccatgcccctcgtactagttcctcctcagatgattcaaagagatcacctttgggcaagactccactgggacgcccagctgtcccccgttttggcaagccagatgggctaaggggccggggagtagggtcccctgaaccaggcccaacagccccatacctgggccgatcgatgtcttacagcagccaaaaagcccaacctggtgtctctgagacagaagaagtggccttgcagccattactgacacccaaagatgaagtacagctgaagaccacctacagcaaatccaacgggcagcccaagagcttaggctcagcctcccctggcccaggccagccacctctcagtagccccacgaggggaggagtcaagaaggtgtcaggggttggtggtaccacctatgagatttcggtgtgagccttcggcacctcccctccccaacgcctctgcgcctacaccaaagggccccaggtggccaccttccttccctcaaggggctcccctcccgtgcatggacgggagcggtgtcaggggttggtggtaccacctatgagatttcggtgtgagccttcggcacctcccctccccaacgcctctgcgcctacaccaaagggccccaggtggccaccttccttccctcaaggggctcccctcccgtgcatggacattttttaaaaccaccgattccaagaggatgaggagtgttttctaaaatgcagtaggcttggggagtcggagagttggggccctgagactggggtagcaacccccccttttatcttttaagaccttcccttccttgatccctggaccagactcagtggacatttgtgcaattgctcgccctggagggagccagatcatttttaaaccagaaataattttttttattattgttacggattctatttttttcctcttctgcgttaccaggtgtgtgtgtacatataatatatatatatatatattataaatatcaaagaaattatatatctatcctgggatgggaaaatgagggagggatacatatacggagggggatcttactcttcccattcctcagaccagcaggaaaagaggggagacgtcagtctttttcctgtggttccctctcatttgtcccagttactaactacggaaatagcatcctctgctggtgctaagtgtgattaggaagaagcctggggagaggtgagtctggaattttggtcacaagagggaaggacttggagaggagaattagttttctaggctcattggcatttagtttccctaggaaaggggtcaaaacttcaagacactggtggtggtgggagatcaggaaaataacttggcctagctcaaacaatattggataatcccctccttgggggagagggattagagtgtgctcctactggccccttggagcctcccctagcttacacagttaacttgattttaaaatccaaggccaggagagaagaatccaaaaagcaatatttttcatcacatgccaaaaacgggggatagagagaaggagtggcaggcctaggcccctccgattgtcccttgggggttacccctcagcccacctcactatggtgctgggtagaggggatacctgggttctaacctctaaataggggagatcccagcctccacaaagaggcccttttattttttattctgattagccattttaaaccaacgaggaataaaaagaaatcctgatct

SEQ ID NO: 480 - DNA, 312 bp, Homo sapiens
tgcggcgctaagtaagaaggggagactgaggctgaggctggggaacatcgggcagcatgagcggctgcgggctcttcctgcgcaccacggctgcggctcgtgcctgccggggtctggtggtctctaccgcgaaccggcggctactgcgcaccagcccgcctgtacgagctttcgccaaagagcttttcctaggcaaaatcaagaagaaagaagttttcccatttccagaagttagccaagatgaacttaatgaaatcaatcagttcttggctaacttctggaaatgggaaaacttctttcttctcttagaaa

SEQ ID NO: 481 - DNA, 3165 bp, Homo sapiens
ttttttttttgaaggaatgaagggatttattgaaaacgaaattacattccacagtgtgggagcggcccgaacataggggctcaaaggccccgttacagaatttttggaagtttaaatatcccctagatgattccattgtttacttcacttaccctctacgtaaatgcagaggatgaagtaaagttacaaagtcacttacagcatacgccctatggagtggatatttcctgttacagccgaagtgtgaattggccttatgttccctgcctcctgaccctattttcctgcctcaggctcactgctcaatgtacacggaagcaataccatggtactgcctttgagaaaagaaaagactttattgcaagaccagccagcaaggagacaggaggcaggttcaaatcttcctccctgatttggggtctggggcaagttctaaggaagcagagggcaaaggaaaggacttaaaaatgttggctgggcaggatctgtttgaaggccttcaaatttggccatttatggtacggtatgttgaggtggattttagcccctatcttctgggccaagagacccttcccttctgagagttcgaatgttcgggttccagtcatgtcccagtcttcttcgttccaaggagacgaatagttggttctggatgtttgttagagatcaaatctttttctatggtgcatgcctgggctttgtgacttaagagtttttggctctgttatacctgcaaggtaactcaacattgttacaaacagagtaagccccgtttgggctggtactgtggttacaacggcacttattcccaccacctagagtcaagagctgctggcacactggctgtttacttccagttcccacggcccctattcccctatacaaaattacacaggaaacatatgcgttcatttaattagcaagtgtatataaaaacatcatagacaaagcaaaagtctctcttgacactctccatcttgacctgttcaccgccccagaccaggtgaggaaatttgaagctatgctatctgcaagtcactggcgcagtcggaataaaagttggtcgtggggggggggggggggtggtcatctgggtcgggactgagtctaggcaggtgggactgagtggtagggacctggggggacatctgggtcgggtctgagtccagacaggccacctgccttgggcctctaacatttccgcgcagcgctgggctttgaggctttccagagcgctgccggggcgggggcggggtgaggtgaggggctcaccctggctctcccacccctgcctacgggctgtgaggtcactcgattcatttctggaactaacttgtaattctcaaacaagtgctattaattctcttccaactaggaacggcctcagtaacgcgccgctgagtcagttttcagggcgggcggtttccccaagtccactcctgaggcccctcaagagcacccaccgcgtccagcttcccagggcgctccttcccaggagaccttcttttcgccactgttttctcccctcttcccacttctccgagggctgccccgcggtctgtccggccgtgtcccaggccttggcgcggctgaggcatgaccggaatgcgcgggaggacgcggggcacggaggggacctgaggcacgtagggaacccggggcgggccggactggcctgggccctcgtcggggcggtgctcgacccggtccgcgccccccgccccgacactcgcagccccgcctccggaccccgggtagttgccatcccctcgcgggccgggtggggcgcgcagctcctagccctgggaggtcccgaggatcgcgaaacggaaagagaaaaaagtctgcgccgagcgcctggcaagcagggcccgccccgcctcccttcccggctggtccagtcaccgacctgcggctccggggccgcgagggaggaggcgcggggggcgcgaggcgggggcgagcgcttgggactcggcccggctcccggctccgggggttctcgtggccgcggcagcgcggtctctgcggaggcggcgggggcgcggcagccggacctcttcctttcagagcggccgcggcgcccgttccgcgggaggcgggcgggaggcggacgcggcctaacctcgacgtcgactaccgcgccgcccgcgatgggaagcgccttataaagccgcgcccggccggcccgagccactcgccgcacgccgcccgctgccccgaacgcgggccatacgcagcctccttggagtgacgggccgaccccggacgaccccggccacggacagacccgggacgaccccggccggggcgcgcctcctgcgggcgggcgggcggcggggctggggagcccttggcgggggcatgcgtgcgacatggcctcggcggtgtttgagggcacgtcgctcgtgaacatgttcgtgcgcggctgctgggtgaacggcatccgcaggctcatcgtcagccggcgcggcgacgaagaggagttcttcgagatccgcacggagtggtcggaccgcagcgtgctctacctgcaccgcagcctgcggacctggccgcctgtgcagcgcctgcgcgacgcctttcccgaggaccggtccgaactggcgcaggggccgctgcggcaaggtgcggggccggggacgcgggaggggcgcggggccgagcagccttgaagtgctcgaaggaggcggggaagagacttcaaccgagattgcgacttctcctttctgcccgccctggacaggggacacttggaccccgcgcccgcagacgaggggtgcccgggcggcggggttagggggacggggagccagcctgcccagcctgggggcgcccccggcggaggagccaaatggggcgggaaaggggccgaggccggcagggcgggcgccggactctccctgaggacgagtcacttccgaggagggcgggggcgcccggggctgagcggctcacagggtcggcccggccctagccccctgcccggtacctcccgagggccggcgggcgggcgcactgggaaagcgtctgggagcagttaactgcagggtccgagccgggggtcgcgtcgggtctggccgccgccccgagttctccccgcggagggcgcgcccctggtcttcgagcgcgaggtgccacgcagcccttccgtccctcctcgga

SEQ ID NO: 482 - DNA, 620 bp, Homo sapiens
ataaaatattataggtttatttaaaacttaattctcaccttgagtatgcaaaatacaaactccacaaaatgttcattttactttgtagtttacaaatatacaaaatagacgtttgcttaaatttatattacatatttattaaggcaaggaactatatagaaaaacacatttgttctgcttaaggcatacttgggaataaaccattgtacaaattattgcacatctgaaaccacagtgcataacagactgtctgcataaaaatgctaaagaagtaaaccaggtatattacctgacttaggtcataaatgttgatcggaagacaaatatagattttccttgtcaaagtatgcagcagtttgaaaactttggcttccttgtttggtacctttagaaccaagactcaccaagcaccatcatttaggctatttaaacatgttttctgtacctgaatttcttcctcttcttctaacatcataataatggcttttagaaggtaaagagaatacaaggtgatcttttatgcttatattgcatcaatacacaattcaagggaattctggtcttccctcccccaactcacggatataatttataccctgatatccacaacaccttagaaa

SEQ ID NO: 483 - DNA, 2162 bp, Homo sapiens
actagggagtgatttgccccggatcaaaacggagattgaggccttgaagaacctgagacatcagcatatatgtcaactctaccatgtgctagagacagccaacaaaatattcatggttcttgagtactgccctggaggagagctgtttgactatataatttcccaggatcgcctgtcagaagaggagacccgggttgtcttccgtcagatagtatctgctgttgcttatgtgcacagccagggctatgctcacagggacctcaagccagaaaatttgctgtttgatgaatatcataaattaaagctgattgactttggtctctgtgcaaaacccaagggtaacaaggattaccatctacagacatgctgtgggagtctggcttatgcagcacctgagttaatacaaggcaaatcatatcttggatcagaggcagatgtttggagcatgggcatactgttatatgttcttatgtgtggatttctaccatttgatgatgataatgtaatggctttatacaagaagattatgagaggaaaatatgatgttcccaagtggctctctcccagtagcattctgcttcttcaacaaatgctgcaggtggacccaaagaaacggatttctatgaaaaatctattgaaccatccctggatcatgcaagattacaactatcctgttgagtggcaaagcaagaatccttttattcacctcgatgatgattgcgtaacagaactttctgtacatcacagaaacaacaggcaaacaatggaggatttaatttcactgtggcagtatgatcacctcacggctacctatcttctgcttctagccaagaagggtcggggaaaaccagttcgtttaaggctttcttctttctcctgtggacaagccagtgcttcccccttcacagacatcaagtcaaataattggagtctggaagatgtgaccgcaagtgataaaaattatgtggcgggattaatagactatgattggtgtgaagatgatttatcaacaggtgctgctacttcccgaacatcacagtttaccaagtactggacagaatcaaatggggtggaatctaaatcattaacttcagccttatgcagaacacctgcaaattaattaaagaacaaagaaaatgtatatactcctaagtctgctgtaaagaatgaagagtactttatgtttcctgagccaaagacttcagttaattagaaccagcataggagagaaatactcactacgcccaatcggtacactacaccctcaaaagctagaaaccagtgcctgaaagaaactccaattaaaataccagtaaattcatcaggaacagacaagttaatgacaggtgtcattagccctgagaggcggtcccgctaagtggaattggatctcaccaagcacatatggaggagactccaaaaagaaagggagccaaagtgtttgggagccttgaaagggggttggataaggttatcactgtgctcaccaggagcaaaaggaagggttctgccagagacgggcccagaagactaaagcttcactataatgtgactacaactagattagtgaatccagatcaactgttgaatgaaataatgtctattcttccaaagaagcatgttgactttgtacaaaagggttatacactgaagtgtcaaacacagtcagattttgggaaagtgacaatgcaatttgaattagaagtgtgccagcttcaaaaacccgatgtggtgggtatcaggaggcagcggcttaagggcgatgcctgggtttacaaaagattagtggaagacatcctatctagctgcaaggtataattgatggattcttccatcctgccggatgagtgtgggtgtgatacagcctacataaagactgttatgatcgctttgattttaaagttcattggaactaccaacttgtttctaaagagctatcttaagaccaatatctctttgtttttaaacaaaagatattattttgtgtatgaatctaaatcaagcccatctgtcattatgttactgtcttttttaatcatgtggttttgtatattaataattgttgactttcttagattcacttccatatgtgaatgtaagctcttaactatgtctctttgtaatgtgtaatttctttctgaaataaaaccatttgtgaatac

SEQ ID NO: 484 - DNA, 1737 bp, Homo sapiens
  misc_feature 1539: n = a,c,t, or g
cgcttttttttttttttttttttttttttttttcttagttttattataaccttgtattttctggcaaaaatataaatctaaatgcatgatctctgggcacacagctcaagtatcagccttgagatgacctaagcagcaaaaatttggcctatttaattaaatgcacaggaggttgcagccgcatttattagaaaaatattatcctttggaaattcctttcttgaagattggctccagggcgttgttctttctgtttttatgcaattgcacttccttggcaggcagccaggcgctccggtgctcacaggccatgggacagtccagttccctgcagacccagcggggcatgggcggacagagccgcaccgtgaagcccgcctgttatttccatcgggtggtcctggagacgacacggctggggaaatgggtcaccggaactccacggcggccagacgcccatccaatttgcctgcgggaactcgctcttcaccttttcttcacaaacttctttctggaagcgttgggatttaagcgtctccgcccagctcccaaggtgctgtcccggacctgcagggtagctgagcggctggagatgtcattctcgacaaagggtgacaccccggcgatgtagtcaggggcgaacacgttggttttctgcctggccttttgggagagtcgcagctgagggaagcgctgatcctcggtgagatgggggttgatggcgtatttgccccctttgggagtgggaagcgagtaccggaggccgcgggggttcagcaccttggggttgcgggagaagtgcatgtgcagggtgccgtcgtcgctgacggtcacggacactttcttcagggtcttgttcccacagtgtgagcagaacactcggctcatgtcagacgttgtcttgaaacagccatggcagcgcaagatgtagctccgggcctcacgaatcagcatgccgttcaccgccagcacgtgcagccccatctgcagcagaacattctgcatggcgaagtctgtggtcaggcagccaacccgcacgtcctcggggacgtcacactgctccagctcctgctggatctgcttgatgttactgggggttatccagccacccccgtcgtcatcgctgtcatcttttctgtcttcaaacccgttttcttcctcctcctcctcctcacttggaacgtcctcacctctgtcaatcagcagctcctgcagttcatgatcgatgttgggcaaagggtttctccagaacatgaaggaactaaattccaggttctcaggctcacaagctgagtgtcctttttctgtttcttgtgggggtttaggcttgtagggcagatggaaaccagaaatgtgcagaggtgtttctgggtgctgaatcgatgagctcaccttaaccttctgtggttcttgttttaggtgagacaccccaacaaactctgcttccaactggtatgtgagtgcaagcacttggatgtccgtggcagagaggctggggtagtctcctgttttctttgaaaactcagtcaccagccgcangtattccggtaagggctccttgaaccgcagctcgtagggcaggacagcgagccgcctgcgtgtggccttgtcccgaatctcagtgaccacctcccggatggtgtaaatgttcttcccgatgtcctgcagagccgcatgccgcaggaaagccccagcatccgccacaacgtgctccactggagccatgttggctgcgtg

SEQ ID NO: 485 - DNA, 1972 bp, Homo sapiens
gccgcttttttttttttttttttttttttttttttgaaatggagtcttgctctgtcgcccaggctggagtacaatggcgtgatctcagctcactgcaacctccacctccccggttcaagcgattctcctgcctcagcctcctgggtagctgggattacaggcgcgtgccaccacgcccggcatgagtggaattttagtgttaaatctcttcctgactctgggttcagtaggtccctcctcttctgttaccctcctggttctctctgttcaccaactacctgcatgtgccaaactagaaaaaggaaataatttacacccctgccccaacagctccttccctcctagggacttctgtgtccaccccccactttgggtcttagaactgtggctagaagataaaagggaggagtttgagtcagaggctttatgtccccaaacccaaccccctctgagtattaaactatagtggcattgtccctcaagctcccctctgccttggctccagagtcttcctcctcttcttccagactgggcagggtggctgttgttattggtgaagataggcatctagccagagctgccctgactcctttagtgagtggatgatgtcggcgaaggctgacagcaggggcttggactggtactctatgccatgcttggcacacaaggactgcaccaggggagccactttgtggtaattgtgtcgaggcatcgtgggaaaaagatggtgctcaatctggaagttgaggtgtccactgaaccagtcattgaaggcagacttgtggacattgcatgtggcctggagctgggtggaaacccagtccatgttccggtcatgatcaatgtgcatgggaatatggttcatctgtgtcacccacacaaaccagttgctttccaggaacctgactatgaagaaaaggcccaggaaggctttcagccccaatagtggcacataagtgaggaagaagcggacgtagaaggtaatcatccaggccaagtccacccacttctttcgctggataacaaaatagaaaatataccactggaagtagagaggcagcaaggctgggggcccaattaggaagaagtatttgtgctggtggttgtacggcatatattttttcttctgtttcccaagctccacagagaggatcttccccaaggcaaagaagaagggatgcatgttgatgtctgggtctttgcggaagcagttgggcttggcatggtgctggaagtgcatgtggttccaccaactggcgggggcccccttcaggtggccaatcacaaaatgatgtagcagatggttccactttgaggtgctgaagaccgacaggtgcccaaagtcatgctgcagccagccagcctgggcctgaactgcactgagcagcaccgcacagaggaggaagggcaaaaaggacgtcccaaagacccaaagggtgagccaggctgcaccatccagcagcaagatgtgcagcaggtacagcaggaagaagacatggttggccttcatgagccccatccgctccactgtggcccgcagctcccggaactcatctgtcagctctttattcttggtgggctcaaagctgggctgctctggagacagttctccaatcaggagagagttcatatacttcttcacaaggcccttgttgatgtggaaggccacaaagggatccgtggcatcctgcccggcgtagtggctgatgacccgggagccccctggatgccggcgggtgaactcgctgatgttgtacaccttacggtcgatcactagccaccgctcctcgcaccctgagcgctgggccacctcgtcccaggtgaagtagcgcggggtaggtccctgagccgcggtctcggcggccaccgggtcgggggccatagctggcctggcgacgccgcgcgccgggccagcaggggctgtcaggcgcgtgctcggggtccgcgggctccaggagtggatttgctggcg

SEQ ID NO: 486 - DNA, 2015 bp, Homo sapiens
tttagaccggaaagtccctactgaagatagctttgcttgaatgagctcaactacattgcgaatgtcatttattgtgtggattgtgcagtcaccatggttgctgtgcctcgagaacatggtcacttccttgactacctatcctgcctcacttacactctctttccctggtcctccttgtttgcttgcttgcttttaagatgccttacaaagaggcccatgtgaaaaaggaactaagtgtagccttcagccaacagccaacaaggactgaggccaataaagaatggaaccgtgccaacaatcatgtagtgaacttagaagcaaattcttccacagctgatcattggaattactgcaactcagatgataccttgatggtagcttgtaagaaacctgaagcagacaacacagataagcagggcccagattcctgactcaaagtaaccgcaataataaatgttgtttaagccacttaatttggaataattggttgtgaaatcataggttactaacacatagcacagcattgtacagctgaagagttatcagttcaagacccttcctcatttgacagcagaggaaaatgaatcccagtgataattaagaacataaagtatgccagtattatgttagtatgatgaatggccttttttaaaagataaaaaaaattcaatcatatggagttttttaaaataaattactgaaacaatcataaagctggagggaatttagagatcagttagtagtatccacttattttatagaggaagaaactaaaatatacttttaaaaattcccttttgtgattggcttctaaactggtttatgagctacatgagaaaaccaggctcataactttgtagctcaccttatttttgaaacccaaacattataatccaatttaaccaacgactttattcactagtcttgacttttggcaagctctaaaaaatcaaatcccctgtcaagggatgaagatttgccactattgaggatagtcaaagaaattagcttcaggctctgaaagcaatttcaagaggagttctaaaactgttttaagaaatggcagtactgctggaataaatgtatagtctgtcaggtcagctactttgaaagggatatagtaatttggatctgtcatttctgcattgtttcttgaagagtagaaacacattatataacaagtgttcagaaaatgatggccatccattccacaacaactgcaacaacaaaaatttaaataaaaggtttcaaacagtgtttcagtctttgctcagccatgtgtacctgtgatcttgaatgtgacctctttgcattttgtagttattgacaatttgggtctgtgacactcttaccaggaattgtcattaactattgaattatttaatattttccttcagtatcatatctgatagcagaactagatttacaattatatgaactatcttccctcagtccctttcatcattccatatatttcatactttctgtgtgcatatgcatcttgattgatatttaaaatgttactgttagagttttatgacatagcttctgaattgcaaataagttttaaatggcttactttgttcagttgtttgtggcaatctggaacaccaatattgaggaagattctgtggctagatctggtatcagtgggaaataagtccatgttttgttatgtctgccatcatcatcaaagacgaagggtaaccacatatatatttgatgatccttcttaggataactgtcttggcccttattgcaataaaaatatctctagagtagattatgtttactagattgtcatccaattataccttagagataataaaagtcctccatgatgtagaaggagagagcatattcagccggtctgtattggaaatgggggatttcatcacgagggaaaatgaaacagaattgtcgcaaatatggtctaaagatccatacttcaggcagatcacgaggtcaggagatcaagaccatcctggctaacatggtgaaaccccgtctctcct

SEQ ID NO: 487 - DNA, 619 bp, Homo sapiens
ataaaatattataggtttatttaaaacttaattctcaccttgagtatgcaaaatacaaactccacaaaatgttcattttactttgtagtttacaaatatacaaaatagacgtttgcttaaatttatattacatatttattaaggcaaggaactatatagaaaaacacatttgttctgcttaaggcatacttgggaataaaccattgtacaaattattgcacatctgaaaccacagtgcataacagactgtctgcataaaaatgctaaagaagtaaaccaggtatattacctgacttaggtcataaatgttgatcggaagacaaatatagattttccttgtcaaagtatgcagcagtttgaaaactttggcttccttgtttggtacctttagaaccaagactcaccaagcaccatcatttaggctatttaaacatgttttctgtacctgaatttcttcctcttcttctaacatcataataatggcttttagaaggtaaagagaatacaaggtgaacttttatgcttatattgcatcaatacacaattcaagggaattctggtcttccctcccccaactcacggatataatttataccctgatatccacaacacctagaaa

SEQ ID NO: 488 - DNA, 1179 bp, Homo sapiens
acatgctgatatactttctactacaatatgctatagctttatggaactcagggtgatgatcagacgtgtcattagaacatgagtcctctgcttctgattcaggcatacttttgggattcttccatctttaaaggaaaaaggaagccattcatctatatttagtaacccagtaatatctcacttagtttagggttagatctttagttaattcaaccttatagatcatacttatgaaggtgataactgacacgtgttccctgaattttaatttgataggcaatacatctacccactccattattttttaaaacttcatttaatagtttaaacaagattggttttgttttcaatttttattcactcttcatagaatcacaattacctttatatatcatatgttattggaagagattcctcagtaatctccaatctctcatagtgcctcacagggttggtcaatggcttttggaactggaaggaccttaaaacttatctgttatgctcctgatagccaatagcagatagaagcttgcaatcaagaggtaggacatgtgttcttcaatggatatcaaaaggaagaggttgcaaaccaaagccatttggcaagccctgtagcctggccatttaagacaggggcggtctcagccaaatttgcacccatttaactatcccaaagagccacagtgcctacaacccaggccctaagttgatgaagaaaaagtcaaggaaggaggtgatacaattggaaatattcccatcaaatggttaatcttatttagaaaatgggcatattagaaaaagtccttccaagatgattttggataataaaagttgtatttgtggaaattggtattatctctgttttatgcacttacatttatcccttacattttgtttttagtgaccctacatgacattaaatttaaagtaaaacattgtttaatgttaccttttggcttgagaatgtctttcagctccagaattattgttactcatattttaatcagtaagtcatttaagctatgacagagtaggaattgagaaattatttcatatgctacagtattgaaatgtggatgctgccttgttttataagaagatgatcaaggtttgtgtgcccattacctttcctctgcctgaaagacgtgtctcaagaaaaataaattctattttagatgc

SEQ ID NO: 489 - DNA, 2456 bp, Homo sapiens
ggtaggcagagcaggacgccgccgctgctgccgccgccaccgccgcctccgctccagtcgcctctggtccttcaaactcacacctcccgggaggagctgtcctggcgccgggtcccgcggggaaaatggtggagccagggcaagatttactgcttgctgctttgagtgagagtggaattagtccgaatgacctctttgatattgatggtggagatgcagggcttgcaactccaatgcctaccccgtcagttcagcagtcagtgccacttagtgcattagaactaggtttggagaccgaagcagcagttcctgttaaacaagaaccagagactgtacctactccagcactattaaatgtgaggcagcctccatctactacaacatttgtgctgaatcaaataaatcatcttccacccttgggatctacaattgtaatgactaaaacaccacctgtaacaaccaacaggcaaaccatcactttaactaagtttatccagactactgcaagcacacgcccgtcagtctcagcaccaacagtacgaaatgccatgacctctgcaccttcaaaagaccaagttcagcttaaagatctactgaaaaataatagtcttaatgaactgatgaaactaaagccacctgctaatattgctcagccagtagcaacagcagctactgatgtaagcaatggtacagtaaagaaagagtcttctaataaagaaggagctagaatgtggataaacgacatgaagatgaggagtttttccccaaccatgaaggttcctgttgtaaaagaagatgatgaaccagaggaagaagatgaagaagaaatgggtcatgcagaaacctatgcagaatacatgccaataaaattaaaaattggcctacgtcatccagatgctgtagtggaaaccagctctttatccagtgttactcctcctgatgtttggtacaaaacatccatttctgaggaaaccattgataatggctggttatcagcattgcagcttgaggcaattacatatgcagcccagcaacatgaaactttcctacctaatggagatcgtgctggcttcttaataggtgatggtgccggtgtaggaaaaggaaggacgatagcaggaatcatctatgaaaattatttgttgagtagaaaacgagcattgtggtttagtgtttcaaatgacttaaagtatgatgctgaaagagatttaagggatattggagcaaaaaacattttggttcattcgttaaataagtttaaatacggaaaaatttcttccaaacataatgggagtgtgaaaaagggtgttatttttgctacttactcttcacttattggtgaaagccagtctggcggcaagtataaaactaggttaaaacaacttctgcattggtgcggtgatgacttcgatggagtgatagtgtttgatgagtgtcataaagccaaaaacttatgtcctgttggttcttcaaagccaaccaagacaggcttagcagttttagagcttcagaacaaattgccaaaagccagagttgtttatgctagtgcaactggtgcttctgaaccacgcaacatggcctatatgaaccgtcttggcatatggggtgagggtactccatttagagaattcagtgattttattcaagcagtagaacggagaggagttggtgccatggaaatagttgctatggatatgaagcttagaggaatgtacattgctcgacaactgagctttactggagtgaccttcaaaattgaggaagttcttctttctcagagctacgttaaaatgtataacaaagctgtcaagctgtgggtcatcgccagagagcggtttcagcaagctgcagatctgattgatgctgagcaacgaatgaagaagtccatgtggggtcagttctggtctgctcaccagaggttcttcaaatacttatgcatagcatccaaagttaaaagggttgtgcaactagctcgagaggaaatcaagaatggaaaatgtgttgtaattggtctgcagtctacaggagaagctagaacattagaagctttggaagagggcgggggagaattgaatgattttgtttcaactgccaaaggtgtgttgcagtcactcattgaaaaacattttcctgctccagacagaaaaaaactttatagtttactaggaatcgatttgacagctccaagtaacaacagttcgccaagagatagtccttgtaaagaaaataaaataaagaagcggaaaggtgaagaaataactcgagaagccaaaaaagcacgaaaagtaggtggccttactggtagcagttctgacgacagtggaagtgaatctgatgcctctgataatgaagaaagtgactatgagagctctaaaaacatgagttctggagatgatgacgatttcaacccatttttagatgagtctaatgaggatgatgaaaatgatccctggtta

SEQ ID NO: 490 - DNA, 2458 bp, Homo sapiens
acccgggccagttttcaaggcgggctgtaactggtggcatttgtcccgggaccaggtccacagttttatgtgtgagcaagatggaggctgacctgtctggctttaacatcgatgccccccgttgggaccagcgcaccttcctggggagagtgaagcacttcctaaacatcacggacccccgcactgtctttgtatctgagcgggagctggactgggccaaggtgatggtggagaagagcaggatgggggttgtgcccccaggcacccaagtggagcagctgctgtatgccaaaaagctgtatgactcggccttccaccccgacactggggagaagatgaatgtcatcgggcgcatgtctttccagcttcctggcggcatgatcatcacgggcttcatgctccagttctacaggacgatgccggcggtgatcttctggcagtgggtgaaccagtccttcaatgccttagtcaactacaccaacaggaatgcggcttcccccacatcagtcaggcagatggccctttcctacttcacagccacaaccactgctgtggccacggctgtgggcatgaacatgttgacaaagaaagcgccgcccttggtgggccgctgggtgccctttgccgctgtggctgcggctaactgtgtcaatatccccatgatgcgacagcaggagctcataaagggaatctgcgtgaaggacaggaatgaaaatgagattggtcattcccggagagctgcggccataggcatcacccaagtagttatttctcggatcaccatgtcagctcctgggatgatcttgctgccagtcatcatggaaaggcttgagaaattgcacttcatgcagaaagtcaaggtcctgcacgccccattgcaggtcatgctgagcgggtgcttcctcatcttcatggtgccagtggcgtgtgggcttttcccacagaaatgtgaattgccagtttcctatctggaaccgaagctccaagacactatcaaggccaagtatggagaacttgagccttatgtctacttcaataagggtctctaaatgccccacttcagcaaggaccagtctattcccatattcaccagctcctccttagctacgtgcacacttgtgtcctccttcccctttgccaacaaggcctgaaggccagggtagattggggggtgggacaatgaatgcctcatacttacaccctggtactggttgattggacctcaggggaaaaaagtgaaaaagggtagcaaaggccaatgtcttctagctgcttcctcaacccctgtcccctggagaccagaagctgaggccctctcagggaggagacatccaagcaaatcatttggaaaagttaggaaacctttaggattctggttccagccagggttgaggaaaagaccttggatcaaaaggaagcttctatacctctttcttcttcgcttcctcctctcccaagcaatggaaacttttacccatgtaattctagctgaactcaggaaaaagaagggggaaaggactctgtccccttggggctcatcacccttccacatcctcctcctcgttgccccctggtcaggcagcttcttttttttttttttcaagatggagtcttgctctgtcgcccaggctggaatgcagtggcgcgatctcggctcactgcaaactctgcctcctggattcaagcgattctcctgcctcagcctctcaagtagctgggattacagggcacctgccaccacgcctggctaatttttgtattttagtggagacggggtttcaccatgctggccagactggtctcgaactcctgacctcaggtgatccgcccgcctcagcctctgaaattgctgggattacaggcatgagccaccacacccagcccggacagcttctttgggagtgctgctaaccttgaaattatcagacacttaggagttattagtgctaaaaaggggaccgtgcaaggcagcagagttacatggttcttcaaatcatgtctgaacctattcttggaatcttctctataataagggaagttctcttaccccactgccacatacctctgttttaaaagataagtccactaactgtgagtaaaaatgatatatataggcattaaccacacactttaatgggtataatttcctggctgcctcccttcctcagcccattaggttaaacaccaaagaaagactggtgtgtactgaataggaaagggaagttttatttggaaccttctaagaggaaatcaaccaggaccaaagagccttaaaggacacacagcaatgcacagccacttcccttccccagcttggctgccctaggtgatttctcaagctccttgggggactgttgtttctcatctggaatcaatgtgtgtatgagttttgtctggtaggattgctgactctgtccaacagatatcactgtgaattgaataaatttgttgaaagggc

SEQ ID NO: 491 - DNA, 2259 bp, Homo sapiens
ttgttaaagaaaatggtcttgaagaaaaaggctgaacaaccagatggcattattgatgacagtcttcatttagaacttgaaaagcaggtatccagtgctagaaggtctcaaagagtacatagaagcataactgttatcagcttactaaccatagactgatatgtaggcatttctggatttggacactagacacattctagcaaacataattttaaagcgaataatatttttaatttatcactgtcatgaaattcttccataaatttgagagttgaaaatttaggtaaaaggatgattgttggtaatttgctcccaagagtattttttgtagccctttattagggcagtcgtgaggtcatgaatcatggtaaaaagaatgcacttgagttagaaatgagaaagcctagtttagatgcttcgcttttacttactgaccagctgggttaacttgaccgtatcctttatccttcctgggcaattttcctaatgtgtaaattggaatgacatctatgctagctaattcataggtgttaattttattcatttctctaacaggcatattacctgacctacattcttcttcatttagtcggtgaagttagttgttctcattctttttcttctggacaacgggtaggtagtgtttagtgttgttgctgctgtttttaaataggtgttactgatgatggaatgagtgagcatgctttatataggagaaaactatgtaaacttttcttaatataaaagctaattgattttgctataagaattcccatgtataccagaaagaggggcatgataatggtcttgtaactatatcgtattgaaaagaattgttggccaggcgccatggctcacgcctgtaatcccaacactttgggaggccaaggtgcgtggatcacttgaggtcaggagttcaagaccagcctggccagcatggtgaaaccccatctctactaaaaatacaaaaaaattggccgggcgttgtggcgggtgcctgtggtcccagctgttcgggaggctgaggcaggagaatcgcttgaacccgggaggtggaggttgcagtgagccgagattgcgccactgcactccagcctgggcaacaagagtgaaactccatctcagaaaaaagaagaaaagaattgtcagcaaatgttaattctgtttgttggagtggaacttaaccattatactttggcagcagtataatatattcataagataccaacatcaccaaataccaaatgggctggtgttgtgctggacccatattgactccagtagaaatggcagtcaggtggcagcaggctacacaggagaactgctaccatctgtagagaccatgcagtttacatagcattttcacttagcaccctttacctagcaacctccatgtaaccaagaacaaagggcctgcatcccgtatggccttacaagggatgagccgggggttcagatgtccttcataggtaaggagtgaaactccatgttggccactcccagattatttggcttgggactccagttacacattcttcttagaccataggttcattttcagagtatgctttagttattgctgtcagatgcatctgccatacagccagcttttagctcgtttcttcccatttctttgccattccccttttgttcctttagaaataacatttgccttcaaaattaaactgatggtaaggcaggctgctttggaaatgcatttctaatattcagattttcattttgaattattcttcccatactcctggggaaagatcttgcttaattccttttatttcatatcttaactattccaattcctgttttaaaacttaggtcggacatgccgggcacggtggcacacccctgtaatcccagcactttgggagggtgcggtgggtggatcacttgaggtcagaagttcaagaccagcctggccaacatggtgaaaccccgtctctacagaaatacaaaaagttagccgggcgtgttggtgcgtgcatgtaatcccagccactcgggaggctgagacaggagaatcgcttgaacccaggaggcggaggttgcagtgaggcaagatcgtgccattgcactccagcctgggcaacagagcgagacttcatctcaaaaaaaaaaaccttaggctggacgtggtggctcatgcctgtaatcccagcactttgggaggccaaggcgggcggatcacttgaggtcagaagttcgagaccagcctggccaacatgatgaaaccctgtctctact

SEQ ID NO: 492 - DNA, 1168 bp, Homo sapiens
aaataatgaacattggtaaaactattctagtgtgatcagaagcaaatttggactgtagtgtcaaattgataaaaaactaagcacaccaatcatgtataagaaaagtagatttaacatttttttccctaaacacttaacccagaagttaacaataatcttgaaaattccttttaaatccaggccctttaggtgatggcagtttgactcaggatgtccaagtccagtgtattttcaataaaattgacttgacagctactgctctgggtgtaagagcagttgactgtgaggaaaagtaaatggttctacagattctttatgatctacctcccaccagaggactgcagtactcccttgttatttatattttctgccccaatttttgccttctccacaaattttataccttttgtagctgcctactccagattacttcacctttccagactatcagttcttccacttttattcttcataaagaaaattccaataacctgtttcacttaggtttttctattactcttcaagcatgaatcctaatttccctgactatatcttacctctgatctccataactgatggattcctatcctagactatgttactctaatattacccaagattttctccagcctgtttttactcttactttgaaacagctgtttaaaatgactcgtaatctgcttaaatctacatgctttttgtggttctcaatccagttacctaccttccagataattccctcactgtcctgtcctctccattcctctgatgtttaagccctgtgagccacctttcccccatcctttgtgcatagttaccattttactctttcttgttgcccaggcaggaatgcagtggtgccatcttggctcactgcaacctccacctcctaggttcaagcgattctcctgcctcagcctcctgagtagctgggaccacaagcgtgcaccaccacgcccggctaatttttgtatttttagtagagatggggtttcaccacgttggccaggctggtctcgaactcctgacctcagatgatccaccctccttggcctcccaaagtgctgggattgcaggcgtgagccaccgcctggccaccattttactctttttaggtacagtaatctaatatccaaagtcttggactcagctaaagagggtatttccc

SEQ ID NO: 493 - DNA, 1048 bp, Homo sapiens
  misc_feature 162: n = a,c,t, or g
gctcgccgcgctgcgcggctgtatttgcggcctgtgcgagtaggcgcttgggcactcagtctccctggcgagcgacgggcagaaatcttgacccagtggagcgcactcgtaacctggatcccagaaggtcgcgaaggcagtaccgtttcctcagcggcggantgctgcagtaagaatgtcttttccacctcatttgaatcgccctcccatgggaatcccagcactcccaccagggatcccacccccgcagtttccaggatttcctccacctgtacctccagggaccccaatgattcctgtaccaatgagcattatggctcctgctccaactgtcttagtacccactgtgtctatggttggaaagcatttgggcgcaagaaaggatcatccaggcttaaaggctaaagaaaatgatgaaaattgtggtcctactaccactgtttttgttggcaacatttccgagaaagcttcagacatgcttataagacaactcttagctaaatgtggtttggttttgagctggaagagagtacaaggtgcttccggaaagcttcaagccttcggattctgtgagtacaaggagccagaatctaccctccgtgcactcagattattacatgacctgcaaattggagagaaaaagctactcgttaaagttgatgcaaagacaaaggcacagctggatgaatggaaagcaaagaagaaagcttctaatgggaatgcaaggccagaaactgtcactaatgacgatgaagaagccttggatgaagaaacaaagaggagagatcagatgattaaaggggctattgaagttttaattcgtgaatactccagtgagctaaatgccccctcacaggaatctgattctcaccccaggaagaagaagaaggaaaagaaggaggacattttccgcagatttccagtggccccactgatcccttatccactcatcactaaggaggatataaatgctatagaaatggaagaagacaaaagagacctgatatctcgagagatcagcaaattcagagacacacataagaaacaa

SEQ ID NO: 494 - DNA, 2353 bp, Homo sapiens
taaaaggtaaagatttattaccactaaactgaaatttctctctgtgcaattcactgttatttaatgctatacccaggtgccatctacagttatcttgaatgccagcagtggtaatggtcttgcattttgtgaaacactggcctacaccatagcatttattttcctctccatagctgtgaaattcatataacgccaaacagccctgcacaggactatgtgctggggagtgggaacttcaaatcctacaaagttataacttgcaatcaaatccagtagattattattgttattattaaataaatataatattattgttaatgattgttatatatatagttattatctgtaatgttttaggctttatagaacattttcatattgttgctgtactatactggcaaagcatagccaggcctgtgaataaagatttctggtcgctattcagctgggtgaactagattttgcagtaattctaagtttactttatactgatacattagttttcttctggagaactcagtacatttttaaatatattatttcatttcatcctccctgcattccttccaggtagggagacacagttgtacaaaacttgatttttaaaatgaggaaagcaatgcttaaaggggtgctttcattttcatttggccttacacaggtttggagtcaggaccaggactaaaattacatcttctgataattaagaaatgacagtaatgttacagctaggagcagcttttctgatatagctggcacatattagggtgcatggattttcaaagccatgtctgccctttgctcctgctacccctgcagagtgcacggcctggagatagagggcagggactgtggcgaggccgccgcccagtggataaccagcttcctgaagtcacagccctaccgcctggtgcacttcgagcctcacatgcgaccgagacgtcctcatcaaatagcagacttgttccgacccaaggaccagattgcttactcagacaccagcccattcttgatcctttctgaggcgtcgctggcggatctcaactccaggctagagaagaaagttaaagcaaccaacttcaggcccaatattgtaatttcaggatgcgatgtctatgcagaggattcttgggatgagcttcttattggtgacgtggaactgaaaagggtgatggcttgttccagatgcattttaaccacagtggacccagacaccggtgtcatgagcaggaaggaaccgctggaaacactgaagagttatcgccagtgtgacccttcagaacgaaagttatatggaaaatcaccactctttgggcagtattttgtgctggaaaacccagggaccatcaaagtgggagaccctgtgtacctgctgggccagtaatgggaaccgtatgtcctggaatattagatgccttttaaaaatgttctcaaaaatgacaacacttgaagcatggtgtttcagaactgagacctctacattttctttaaatttgtgattttcacatttttcgtcttttggacttctggtgtctcaatgcttcaatgtcccagtgcaaaaagtaaagaaatatagtctcaataacttagtaggacttcagtaagtcacttaaatgacaagacaggattctgaaaactccccgtttaactgattatggaatagttctttctcctgcttctccgtttatctaccaagagcgcagacttgcatcctgtcactaccactcgttagagaaagagaagaagagaaagaggaagagtgggtgggctggaagaatgtcctagaatgtgttattgcccctgttcatgaggtacgcaatgaaaattaaattgcaccccaaatatggctggaatgccacttcccttttcttctcaagccccgggctagcttttgaaatggcataaagactgaggtgaccttcaggaagcactgcagatattaattttccatagatctggatctggccctgctgcttctcagacagcattggatttcctaaaggtgctcaggaggatggttgtgtagtcatggaggacccctggatccttgccattcccctcagctaatgacggagtgctccttctccagttccgggtgaaaaagttctgaattctgtggaggagaagaaaagtgattcagtgatttcagatagactactgaaaacctttaaagggggaaaaggaaagcatatgtcagttgtttaaaacccaatatctattttttaactgattgtataactctaagatctgatgaagtatattttttattgccattttgtcctttgattatattgggaagttgactaaacttgaaaaatgtttttaaaactgtgaataaatggaagctactttg

SEQ ID NO: 495 - DNA, 2557 bp, Homo sapiens
gttaatgccttaagtgcttaatttgttgtgtctggtcctggccagggtctggctgtacaggaggactggaagggcatcctgggagtttcctggtgtccacaggccggacaaaagcaaccccgactccttagagcatggcatggctcagaggtgctggtaaaactgatgggggtttttgctgtccctcccctcagcgccgacaccatgtggatccaggttcggaccatggacgggaggcagacccacacggtggactcgctgtccaggctgaccaaggtggaggagctgaggcggaagatccaggagctgttccacgtggagccaggcctgcagaggctgttctacaggggcaaacaggtacacccgccgccagcacctttgttctatgcctggtccaggcctcgcgcctctgcagccaccagccgatactttctccctcccacctccccccccaacaacctcgtccggtcccacttcatctctcccggaaggagaagtccacagaaacctcaaatgcctgcgagaggaaggaacaaagggaggactcacagattgacacgctgggctggcggctggccctcgaatctatagggtctgggcttttaaacttcttttttcaaagctccgcctcaaaataatggctagagaaagaagttttggaggtggccgatggaaggctgaggaattttcgagaaagggcccaggaccatctggtagctaggacggaggggaccaggttttcttttttaaacatccaccaccaattgctctcagcctgtaccggttaagcatcagaccctgcgagtgtttgtttctaaaaatttggattagcttattcagagtctggagatggcgcttgctaatcaggaatttccgccaccctgagcctgctgtgctgcggctgctgctgacctggggcgtgtggtccccgaggggtccaccgaccctcgtctctttctctgttctgtctccagcccctcgttgcatttaaaatgtccccctttgatttcatagctgccacgtttggggcgctccctccattggcacctgggggtggaggtgctactttggttggtgtttttgtgggggactgtgggacctactgggagtggggtttcccggcaggatgagacagtgtgatcgaaggtgtaggtcccatctgctggagttggttggaccgtggggacgggcgtagactactggaactggattaaaagtcgtcagttgagctgcgtgtaccccactgtgttgttgttggattttgaaccgggtactgctgccatctggtgtctaggttggaaaataaacactgcgcccggccaggggtttttgggggctgggaggatcatgcctgctcactccagatgagacctgatgattaatttctctggcttgcatgccataggagaccttcattagccctcttcccgtaagagacgtgatgacttgagtcttaagaatctgagttaacccgccctgccccgggaggaggcgatctggagaacttggggagttgacggtgcaagccgcgtgtgtgcagagaagaggtagggccgggctcgacagaggagctccgcctggcgctctcttcctccctcctcctatgatgcgtgctccctttgtggcatccaaactgattttgatttgccactcagcctattgggtcagcacagaaggcttcatttcacaaagagtttctgaagcctgcaaggaccttctaagttcacagcgtaggtcagtggcgggttggactctcatgctcccaagttcaggagaggagataatgctgagtatccactctatgccagccaccgagctagcattttaacttttgcatttcaaccatgcaggaatgggaaaacacctagacacacctgccatgtagatttcaccatcggtattctgacttattaggtttatcttgaagcgctctgtctttctctctgcccgccaatccatctttttgggatgcatttcaaagtaagttgcagacaccagtccacctttcccttattactgcagcacaccgtcagtacctagagctcagtatttgtttttggttctgttttcattgattttttttgttgttgttcctatttgagacaggatctcactctgcccaggctgtgttgcagtggcacgatcacagctcactatagcctcagcttcctgggctcaagcaatcctccagcctcagcctcccaagtagctaggactataggcatgcaccaccatgcctggctagtttttgtatcttttgtagagatggggtcttattatattgcccagggtggtctcctgggctcaagtgaccctcctgccttggcctctcaaagttttggggttacaggcgtgagctacagtgccggacctaaaagctttgtctatagtgaaacagatgttagacagactgaataattttgacaaatgtctacatccatgcaacccaaaacccctatctcccctcatttgtaacataatacttgagtcttacaatagtgtctgtcacatttctaagtttagtgtgacaatgacaggaacacgggaaccttagaaa

SEQ ID NO: 496 - DNA, 2496 bp, Homo sapiens
caaaaagcaaagaggggtactccacaccaagcaaaacaggctgtgcactgtatacacgccatattcacaaataaagaagtccagcttgcacagatttttgagtcaacaggtgaaaagaatggaaaactgtggtctccagatgaagaggtttcccctgaagtactagcaaaggtacaggcaattaaacttctggtaaggtggctgttgggtatgaaaaacaaccagtctaaatctgccaattcaacccttcggttattatcagcgatgttggttagtgagggtgacctgacagagcaaaagaggatcagtaaatctgatatgtctcgcttgcgattagctgctggtagtgccataatgaagcttgctcaggaaccttgttaccatgaaattattaccccagaacagtttcagctctgtgcacttgttattaatgatgagtgttaccaagtaaggcagatatttgctcagaagctgcataaggcacttgtgaagttactgctcccattggagtatatggcgatctttgccttgtgtgccaaagatcctgtgaaggagagaagagcacacgcacgacaatgtttactgaaaaatatcagtatacgcagggaatacattaagcagaatcctatggctactgagaaattattatcactgttgcctgaatatgtagttccatacatgattcacctgctagcccatgatccagattttacaagatcacaagatgttgatcagcttcgtgatatcaaagagtgcctatggttcatgcttgaagttttaatgacaaagaatgaaaacaatagccatgcctttatgaagaagatggcagagaacatcaagttaaccagagatgcccagtctccagatgaatccaagacaaatgaaaaactgtatacagtatgtgatgtggctctctgtgttataaatagtaaaagtgctttgtgcaatgcagattcccaaaggacccagcctccaatgaaatttttacacacctgaaaaggacttctgtaacgataagagttatatttcagaagagacaagagtacttctgttaacaggaaagccaaagcctgctggagtactaggtgcagtaaataagcctttatcagcaacgggaaggaaaccctatgttagaagcactggcactgagactggaagcaatattaatgtaaattcagagctgaacccttcaaccggaaatcgatcaagggaacagagttcagaggcagcagaaactggagttagtgaaaatgaagagaaccctgtgaggattatttcagtcacacctgtaaagaatattgacccagtaaagaataaggtaaaaatgcatttgcaaagggagaaaatgaaggccaaacagaagcaggctccagcttctgcaaaaacttggattcacaaatgtccctgaacagaaaatgaagctcacttcagaacacacactctctgccttgaaaactaaagagactattacttccttttcacatgaccacaagtcctctgatggaaatgtacagcagaaactcttgagagagaggctaaaagcaactctgttctcccccttcccctagacttttcttacgaaaagtcaataattaagcaaattgcttaacacttggttccagttcctgcctatctggagtttaaatgcgtaatacaccattaatttccacgctgcagtttttattttaaagaaagtaacaagatgtctttacactgacactgaaaattcatccattttagagccaggaattcccatgttacacaggaaaaaatagaagtctactgaattaattttttaaaagaaaagagatcagattaaatatttctttgtttttccttttggaaacttttatgtataattctttctgcctgcctacttttctgcaaaaatgagatgtacagatttcggttccctgctatgaaaagtgatgtggtagcaattttataaatgttgctttctgatttttatcagagtgagaaaattaaaattattgatttgcaagtagtaaacagttcatattttgatttcccctcattttagtttaatataatttgcaataaatgtacatattgttgtttgtttcataaagcatatcactttaaaatggtttttactcctgtgattatgttggaatatttggaatttataaaggagtaaagactgtccagcatttggttttataatgtttgtcaccagatttttattaatgtaaaaaaaatcaatttttaaaaaatagttggactttggcagcttttaaggaaagttggaggtgttttaggattgctatcaattttcagcattgtgctatttggaaataagtgttttgcttttgtctgatggtctgggctcatttttatgtttattttagaaaactgttgcatcaatatattatgtttcttggcattgttcagcataggtaatgtgtgcactttatgtgtacacataatcatatttaagttttttgcataaaataaatgcttctagatgcttagaaa

SEQ ID NO: 497 - DNA, 2053 bp, Homo sapiens
agaatttatggatctactgtgtctctgaagtttgtttaaaaacagttttgtctgtattccctttgttattttctgttaattttattcctcatacaaaatggcagtgatcctgttacttgctctctgctccaccatgtaatccttgctttagaagcaaagccaagtagaaggatgattctcggatgaaatatgtcatgctttgacagccagcacgtaccccctcggcttggcaggaaggagcacaatgggatgggatgacagcatgtggatggaaagtagcacatttgccctggccaggttgctccttgcagaatacagatcccagctcctctcaccattcccccagggaacctcatctcagacctgcattttcacctccttggtgtacatcatgaatgcttcacagatgcctgcagctcaagctcaacgttctcctcctgttctctctttgttaggataggatcatccatgtaggggcccacactagaaacatgggtcttatcttcagattctgtatctttatgtcttgtgtctaatcaaatgtatgtcctttggctcggttgtgctacacctgtatgtacataagaatcacctgggggtcttttaacaaaaattaatgggactccccaagacttattaaccttcatctccagaggtggagaccacaccaccagtatttttaaatacaggattcctgagcttctagtgactctgatctataaacaggtttaggcataaaatcactgccattttgtatgagccaagagtttaagctttgtggctatagatgagacatgataggaactctgttccttcctgttttttcttgcttaaaaacaaaaaaaaacattgtgttgatagttcttcctgtgatggactgaatatggatatgaggatccatatttcctttctgtccttttttcttttttttctttttcttttttttttttaatcagtgtcttgctctgttgcccaggctggagtgcagtggtgcagtctcggctcactgcaacctccacctcccaagctcaagcgatcctcccatctcagctacttgggaggctgaggtgggagaatcgcttgaacccgggaggcagaggttgtggtgagccgagatcatgccattgaactccagcctgggcaacaagagcgaaactccgtctccaaaaaaaaaaaaagacacttatttaggctttccatatatcatgggaagacatgtaaggaatttgcataagacagctatgcaaaatggagctggaggagctttatttgtgcacagagatactcctgagaataaccctgatactccatttgatttcacaccagaaaactataagaggatagaggcaattgtaaaaaactatccagaaggccataaagcagcagctgttcttccagtcctggatttagcccaaaggcagaatgggtggttgcccatctttgctatgaacaaggttgcagaagttttacaagtacctccaatgagagtatatgaagtagcaactttttatacaatgtataatcgaaagccagttggaaagtatcacattcaggtctgcactactacaccctgcatgcttcgaaactctgacagcatactggaggccattcagaaaaagcttggaataaaggttggggagactacacctgacaaacttttcactcttatagaagtggaatgtttaggggcctgtgtgaacgcaccaatggttcaaataaatgacaattactatgaggatttgacagctaaggatattgaagaaattattgatgagctcaaggctggcaaaatcccaaaaccagggccaagattttgagacggagtctcactccgtcacccagtctggagtacagtggcgcagtggcacaatctcagctcagtgcaagctccacctcccaggagtggacgcttctcttgtgagccagctggaggtcttacctctttgactgaaccacccaagggacctggatttggtgtacaagcaggcctttaatttatattgaactgtaaatatgtcactagagaaataaaatatggacttccaatctacgt

SEQ ID NO: 498 - DNA, 2610 bp, Homo sapiens
ttttttggctgttcaggactggactccggtccctttattgagactgacaggccagtgggtccacccaaacaaaaataaatttctctcccaaagcctgcctgcaggctggggcacccagcatgtcctggctggggcccatggctgcccctaaccccaacagcacaggtctggctccctgggaatgagaggatgctggctatccagtatctggagatcctaaatgaagagggaggtgagtcctggtggccccctacccccaggagagctggccgcaaatccatgatctgtgttgggccctcggggctcagtcatcggccagggtgatgacgtcgtactcgatgccctggtgctgcagctgttgaatgtgttcgggcactgtctcgtctgtaccaaacaggccctgggcttgggccatggcagcatcagccactgctgtgacagctgagtgtgctgcagcctcaagttgagcctgtgtgacaagctgctggcctggggacacaggcacatactggatctgggactcctgaaggaacggggctccttgttcatactggatgtgtgtgatctggccctcctgtacctggatgtgatggccttcagggaccacaacatattcctgggggagcaggtgctggacaccatcctgggagatgatatactgcacctggttgtcggaggtcaccaggtgctgtacggtctggccatctgccgtggtgatctcttggatgtaggcggcttcctcctgattggtcactgtctgttcctgggcaacgatgatgtgttcctggctcagtgcctgctgtagccgctctgggcccaggaccccgtgactggactggagtgcagtgtgcagggtggccagtgtttcgtcatcactgttcaggatgatggtctgggttggggtctgggtaggggcccgggctgtaggggttcctgacttcctcccatcaggactgtgcagccgctggatgtggaacttgaggtgcccgttacggttgaaacgctgcccgcagaggtggcatgcaaaaggcttctcctttgtgtgagtcagcatgtgccgacgcaggtccttcttgttcttggaggcaaagctgcactggctacactggtggggccgtaggcttgagtgctgtgccatgtgcgcccggacctcgggccactggcgggcactgaaggggcagtcggggcacttgaaggcaccaggcccagcgtgggcccgcttgtgactctccatctcagctcggccagggaaggcctcggcacagatcttgcaggaaaacttctttgatgcagcagtggctgcagatggcggtgacgggggcactgccaggcccagggctttgctggttgcaggaggtgaggaggcagagctctgggagtcccctacgcagtgggtcttggctggagatgggggctcagggccgtctctgggcagtcccccacactgcagcaggggccatttggcaccagaggccagagcatctggacttgggaaggagatggagccatctgcggtgagctcaatgtggtgcaactgggtaccatcagtagccatgatgtagtgggtgccagcttcttttagggtgtcactcacaaccacagcctgggctgcctctcctgcgggctcctcgctgtaaggtgtgccaggagctgatgttccctcctccatagggggtgctgtgatgacactgtagccagtcccaccaaatggaccaggtgccagggtgatctgcggtaggtcaggagggcctagctggctctcgtgctgctgcaccgccccctggctctgccacgtggagggtgaccacctgtggagtggcaccttcaggggagggctgcccaccaggggatgctaaccctgcttccacatcttccgacttcaccacagccacctgcagggctgtgccccccagttcccgctgagcactcatgttcagcagaagatccaaggctgtctgcgtggccatcgctgtcgactcctcagctccttgctggtagatgatggtggcgccgcccagggtgtcagaacagagcaatgagggagcctcagatgactggaaagttgtcgcctctgggggtatctcaggaggtcctggggaactgggaggtggtccaggggccgcactgtgctgctgcttcagctcctcaatctgctgcagagagaagaaggggcgacggcgggaggggggctcctcagggtggcgcctcccccattcctcgaagctgcttgcgtgtcggcaccgtacgtgcaggcgcaggttcttcttgtgccgtgtgctgaagtggcagtactcacaggcgaagggcttggcccctgtgtgcttgacagccacatgggacagcaagaagtcctctcggaaggtgcggtagggacaaaagctgcatttgaagggcttgtcactgacgtgggacaactggtggttcagcagtgccttcttgtcttcacaaacaaactcacagaactcacacttgaacctgcggttggcaacagcctggatgtgcgtgagcaggtgcattttgaaggtgtagcgcttcttaaaggactttccacacttgtcacacatgtggggattctcagtgctgtgcgtcttcatgtgctgcgtgaggaaa

SEQ ID NO: 499 - DNA, 1212 bp, Homo sapiens
  misc_feature 586,1175: n = a,c,t, or g
tattatatacagagatggctcaaaaatggggtttcagatctttgtgacgaaatagaatactgtttcatatttgaatcagagggcttcttgttctgagaaataggttcaaaatcattggaaccaggaacaagaatagcttattgttatctgtgataacactgttttctaaacacaaggattttcttttttattaatatgcaacatagacattgccataacagaataataaaccacatgtggggttttaaaaatgaaatttggctaataggagcaattcagctatttttctatacagtaattggtgtgtggtatagaagaaaaacgggttcaaccccacttctgccacctaccagctatatggccttgaatgagtcattcagctttaataaggttcattttcttctgtttaaaaagacacaaaacttgaaaatcagctttggccatctacctgagaattagaaagtctgatttttggaattagaaatcatgattgtaggctgggcacagtggctcgcgcctgtaatcccagcactttgggaggccaaggcggacggatcacttgaggttaggagtttgagaccagccnggccaacatggtgaaaccccatctctactaaaaaaaaaaaaaaaattaggtgtggtgacacatggctgtggtcctagttacttgggaggctgaggcaggagaatggcttgaactggggaagcagagcttgcagtgagccaagatggtgccattgcactccagcctgggcgtgacagagtgagactccatctgattgtaaagcatctagtacagtgtacagtgccttggaaatgataggtatggaataaatggtaattatttttatattatatatattatgtattcctgttattaagtgtagagttttatgagtataatttgattttattaccttcttttttacaagctgttttctcagtatttttcttggatgggatgacgctaggcgggcaagtttttttcatcactatgattttataaaacaattttttctatgaacctttacttacttgactggattggactaaaagcactgatcagaggccaccacataaaaattcagcccctttgtccttccccgtgcctcccaaagttactttaagatccttagaatatttctttaaatattttatagacaaaaaatttaaanactatctgtattgcaaaattaaactatttctttaacg

SEQ ID NO: 500 - DNA, 1743 bp, Homo sapiens
  misc_feature 1676: n = a,c,t, or g
cctgagtctcgaggaggccgcgggagcccgccggcggtggcgcggcggagacccggctggtataacaagaggattgcctgatccagccaagatgcagagcacttctaatcatctgtggcttttatctgatattttaggccaaggagctactgcaaatgtctttcgtggaagacataagaaaactggtgatttatttgctatcaaagtatttaataacataagcttccttcgtccagtggatgttcaaatgagagaatttgaagtgttgaaaaaactcaatcacaaaaatattgtcaaattatttgctattgaagaggagacaacaacaagacataaagtacttattatggaattttgtccatgtgggagtttatacactgttttagaagaaccttctaatgcctatggactaccagaatctgaattcttaattgttttgcgagatgtggtgggtggaatgaatcatctacgagagaatggtatagtgcaccgtgatatcaagccaggaaatatcatgcgtgttataggggaagatggacagtctgtgtacaaactcacagattttggtgcagctagagaattagaagatgatgagcagtttgtttctctgtatggcacagaagaatatttgcaccctgatatgtatgagagagcagtgctaagaaaagatcatcagaagaaatatggagcaacagttgatctttggagcattggggtaacattttaccatgcagctactggatcactgccatttagaccctttgaagggcctcgtaggaataaagaagtgatgtataaaataattacaggaaagccttctggtgcaatatctggagtacagaaagcagaaaatggaccaattgactggagtggagacatgcctgtttcttgcagtctttctcggggtcttcaggttctacttacccctgttcttgcaaacatccttgaagcagatcaggaaaagtgttggggttttgaccagttttttgcagaaactagtgatatacttcaccgaatggtaattcatgttttttcgctacaacaaatgacagctcataagatttatatacatagctataatactgctactatatttcatgaactggtatataaacaaaccaaaattatttcttcaaatcaagaacttatctacgaagggcgacgcttagtcttagaacctggaaggctggcacaacatttccctaaaactactgaggaaaaccctatatttgtagtaagccgggaacctctgaataccataggattaatatatgaaaaaatttccctccctaaagtacatccacgttatgatttagacggggatgctagcatggctaaggcaataacaggggttgtgtgttatgcctgcagaattgccagtaccttactgctttatcaggaattaatgcgaaaggggatacgatggctgattgaattaattaaagatgattacaatgaaactgttcacaaaaagacagaagttgtgatcacattggatttctgtatcagaaacattgaaaaaactgtgaaagtatatgaaaagttgatgaagatcaacctggaagcggcagagttaggtgaaatttcagacatacacaccaaattgttgagactttccagttctcagggaacaatagaaaccagtcttcaggatatcgacagcagattatctccangtggatcactggcagacgcatgggcacatcaagaaggcactcatccgaaagacagaaatgtaggaaa

SEQ ID NO: 501 - DNA, 1971 bp, Homo sapiens
gccctttttttttttttttttaacttcaagaaagaaatttgctaaggaaacttcagatcgccaccatgaataaacaacgaggaccactggctccaaccagaaaagcacacacgatgaaaacaaagctatgtagtacatttgaaccgtgccacaaatgaagaggctgagcctgtggcccgctctttctttgctacacagatttgctagacaggggttaaagatcatcgaacatcaaactgagataagtcagaaggcttggaagagaactgcaatgagacaaacttttcccactgtgtgatgcagaaggattgatattgcctctctgccacctaagatcctcccctgtatcatggtgttgggtggactacagctttaggaagccaacgtcagactagtgtggtgcctggtccttcagattggctgaaggaagagactgaagaatgaggcttaagttctcattggtgagatgggaatatgaaacagcatgtatttactaccagtgttgtggggagaaaaagaaaagaaaagaaaagaatggaaagtgcccagaaatgtgcctggtgcttaatagatctatttgcagcctggagaagagagctgtggtcacttgaaatataaagattatccttatccatttaactggcttactccagtgcctaagatgcgtacatgtacgagtttgtatatttttcccctttctctctttgctaaaaatggaagcttcttggccccagaatggacttggtttcaactaaaagctgtaggctgacaaccatcccctccctcccagctgagttcagcccctcttcaattgggcaaaaataaaacggggacaatttagactttaaagaccatctccataaacaaaacaaacccactccacaatttgtctagggcattcctccctccaaagcctccttatttaatttctggggaattttaaatagagggcttgcaaaaatccagtaccgcctgacgttagcagctctctgacaacgtggattcttctacttggtgtggggagcagccaccacgaatgccgatgcttttccaggctcctttcccagttggaatttgggagccactggtgtcaccctaggagacaagaggcagagggcaccctaggtgcctaagagacagagtcccacttggggtcgtttaactctgcattccccaagccctccggccaggtgaaccaatgaacctgagtaacacctacactagtgtcatcttagtgtgtttatttaagttgactttattttttaaaacttaaacatgtatttcaaaaagacattttcctatgctacagtggatggaaaaccagcattcctaggtatagacgggagattccggaaaaacacatacaatgaaacaatgccatgaagttcaacaagagagcgaggcaagttctagcaagattctaagcctgggtcagatttgctcttggtcaaacaaacaaatgacatcagccagcgtctgacagatgttaacagcacaggagccccaaatggagattctccccttgacccaatgtggagtgaaagagaactgaaaggaaagaaacttctcatgacgagattcaatgccactcaatgctgtgtccgcccagcacatgtttgcacgacccactctcggggaaccactgatcttcttcaggtgaagcttggggtaaagaatctgcagaccaggccaggcgcggtgctcacgcctgtaatcccagcactttgggaggccgaggcgggcggatcacgaggtcaggagatcgagactatcctggctaacagggtgaaaccccatctctactaaaaaatacaaaaaaaaattagcagggcgtggtggcctccacctgtagtcccagctactggggaggctgaggtaagagaatggtgtgaaccacggacatggagcttgcagtgggctgagattgcaccactgcacgccagcctgggcgacagagcgaggctccatccc

SEQ ID NO: 502 - DNA, 562 bp, Homo sapiens
ttttacttatactatgccagagaggaaactataaagtaattacacatgtaatcttgggtttttcacatatgtaggtattcattttgagtaggttgaagaagaaaaaaaatatttaaatgaattgaattcctgatgggatagtatcaataagtatttaaaagccagtattctaaaaataataaagggtagggtcatttttgagtttgtttttcttttgctattgttaatattcaaaattaaagtgttacattggtacctgttgtcttaatgcatttattgagaacagcattgagatgatgaacaaggggttagcaatagcaaactctataattattttgactaattacttaagaggaaaacagtataagtatctcattcagtatttagcaattctgtaaaataagtattatctctatttttcagatgaggaagtaagggtttagcaaggttaagagatctatccaatttacacagcaagttagtagttgagcctgaccatgagtcttctgactctgttcttttcactatgcaatacgcaaacaataaaatgttatacaaatag

SEQ ID NO: 503 - DNA, 977 bp, Homo sapiens
atttttagtagaggcggggtttcaccgtgttggccaggctggtctcgaactcctgacctcaggtgatccaccagccttggcctcccaaagtgctgggattacaggcatgtgccaccccacccggccttaatggccattttcttaaagagaaatagtgtttcttcaaaagtcatcatcaagcgaaggtcttggcgaggatatcttcatgctggtgcaagtgaactgtgccaattcctacagcgggtactggcaaagggggccggcccaccagacggagcttgcaggccagctgcttttcaaaccttggagaaacaaacgaccacggacccatgttctgaggttcctcctgactccaaatatgatctttaacatgtttgtatttgctcatctcttgctgtaaagaatccaacgggaaggggcagagttcctctactcggatgatggcaaagtcatgcttcttggcccccagagattctctttgtttcaccagggagtagaaatgtttgccggagcagaacacgagggtcttaaccttttttggatccacagatgaatcaccaatgaccgggttaaatgttgttcctggtgccatttcttgaagagttgacacggctgccgggagcctgagtaacatcttaggggaagcaacaatgagtggttttctgaagttccggaccatctgtctcctaagcaagtggaaatactgtgcaggagttgttgggtgaaccacaaacatgttcacagtgtctccgtccaccccctcttccgcactgtcacacatctgcaggaaacgctctattcgacaggatgagtggtctggcccagccccatcgtagccatgtggaaggaggatgacaatgccgctttgtaggagccacttggcctctcctccagagatgaatgtgtcaaagatgatctgggcaccattgaagaaatcgccaaactgcccctgtgggaggcacagtttgccttagaaa

SEQ ID NO: 504 - DNA, 797 bp, Homo sapiens
atgaaattgagccgccatggtggggaagcccaacccaaatgtgtcatctctgctgtgagctagacagcacagtggctgtgggcctggagggcagggctgcctgatgggcagccatcctgggaatgtctgcaagggtctggtgcttggtacagaccagtgagtctggggaattggggtctccaccaagatctgtgggtgcacttggcatgtttgctgcagaaaaggccccagaatgggctggcttgaactggaaaaacacactttctcatcccttttggaccacgagcttcttgagagcaaagcatgtgtttgatattcctttgctcaccctcaggccttgtttggcaaattgcctgggatacagaaaataaggacaaggtctgggtgtagtggcttatgcctgtaatcccagcactttgggtgaccaaggcaggaggatctcttgaggccaggagttgcagaccagcctgggtaacatagtgagaccttgtctctgcaacaaaatttaaaaattagccagacttggtggttcccacttgcaatcccagctatttgggaggctgaggcgagaggatcacttgagcgcaggaatttaaggctgctgtgagctatgattgtgccactgcactccagcctgggtaacagtgagaggcctcatttcaacaataaaacccagcttgggccgggcgcggtggctcatgcctttaatcccagcactttgggaggccaagacgggcagatcacgaggtcaggagatagagaccatcctggttaacacggtgaaaccctgtctctac

SEQ ID NO: 505 - DNA, 738 bp, Homo sapiens
ctcgctttgttgcccaggctggggtgcagtggcacgatcgcggctcactgcaacctccacctcccgggctcaagcgattctctcacctcagcctcctgagtaggtgggattgcagatgcccgccaccgcacccagttgatttttgtatttttagaagagatggggtttctccatgttggccaggctggtcttgaactcctggtctcaagtgatctgcccgcctcggcctcccaaagtgctgggattacaggtgtgagccaccgcacccaatcctattaggtttctttgaatcccctcatggcctgcctggtttttgctcagcctgtcttcagcttgaggagctgggaagctctggtggatgctatgaactcacttgctgaagagcagcgttcaggtgcatccccagccagggcacgtggctccctcagccatgaattcacttctcttcaggaggtttggcttggcatgaaaatacttcattcagagtatgggcaaatgcttctggaaaacccttccctgaagagagagaacgtgtgtgtgtgtgtcggtgatcacaccctcccatccttcctgcctcctgccccaaaccccgggttcctgggtctggaagggccttctctccaagctgggagctcctgggcccccaccattcactttttgtccttgctgctggcaaacagtaaagaaactcactttccctgtggcacgttatgcttcagaattaaaacaatgaagact

SEQ ID NO: 506 - DNA, 1923 bp, Homo sapiens
tttggtcttcatggcaggctcaaaactgaaggagatctttgacaagatccacagcctgctctctggaaaacctgttcaatctggtgggcgctctgtgtctgtcacacttaacccacaggggccggactttgttcaatacaaactggcagagaaatttgtgaaacaaggcgaggaggaagtggcctctcaccatgaagcagcattccccattgcagttgtggcatccgggatctgggagctccaccccagagtgggggacctcattcttgctcatctacataagaagtgtccttactctgttcctttctatcccactttcaaggagggaatggctttggaagactatcagaggatgcttggttaccaagtaaaggattccaaagtggagcagcaagacaactttctaaaacgcatgtcagggatgatccgtctctacgctgctatcatccagctccggtggccatatggaaaccgacaggagattcaccctcatggcttaaatcatggatggcgctggttggcacagatcttaaacatggagcccttgtcagatgtgacagccaccctcctctttgacttcctggaggtgtgtgggaatgccctcatgaagcaataccaggttcagttctggaagatgctaattctcatcaaagaggactactttcccagaattgaagctatcacaagctcaggacagatgggctccttcatacgcctcaagcagttcttggagaaatgtttgcaacacaaggacattcctgtccccaagggctttctgacttcctccttctggcgctcctgatgtcactccatcacccaccatcaccgctgctgcaaagaggcaataataaaggaactgaagacagctgtatttgggagaagtcatgtcagattcagaaatttgccattatgtatttttatgtatttatgccttgtgactaggagaggagattttcatgggtcacaaaattcttggaggtcccttagtagatttggtagttccttaagagatccacgtgataaaataaatggagttggcctttcttgttttttgcaaaagtgataaaaggtctttagcacttggtctcctcccttgtctctagtgtctttcagaaagttggcaataccttaacaaatgcactctgagctggagggagcccaccatttgcacccacctacccaccctcacccctgttcagatgaatttccagaaagagctaaggctcataaggttcccttttaagtattatttaatagttgaggccagatacttacatgcaagtctgggttatggttgttttgcctttctcagcttgtgaagtcattctaaagctagaggaagtatgtgatatacacatggactaaggctcaggtgacactatggctagattaacatctgggattaggactggaaacacatgtcattttgaactaagggaaactctttgtcatcctaatttggaatttggtccctggatggctagggatccatgaaccaggcaggtaccttttttgtttttgttttgttttgtttcttttctgtttgaattaagatgggctaagatggggcttgcaacattaaacatgagctgagcatccataagcattgaattgggattaaataaagatgttgggcaggaactgaacactgctaatatgatgataaatatgcctgactaaagccactacagaaatccagagattggctgttaaaatttgttttgtggaaagactaattctctttgatactgcagaggcagtggccatggatctgttcctctgtgctaaatgtcttgtggcagggtgtgtttgtgggggagtgttcactggtactcttgagtggcctgaagtgacccattctatgaattgttaattaaggtgccaaaaaaaattaataataaagcttggttttttgaaaaactc

SEQ ID NO: 507 - DNA, 2477 bp, Homo sapiens
cgaggaggccatggaaaccccaacacctttgccgcctgtacccgcctccccgacctgcaacccagccccacggacaatccagatcgagttcccacagcatagctcgtcgctgctggaatctctgaaccgccacaggctagagggaaagttctgtgatgtgtccctcctggtgcagggccgggaacttagggctcataaagcagtgttagctgctgcctctccttacttccatgacaagctgcttctgggggatgcgcctcgtctcactctaccgagtgtcattgaagccgatgccttcgaggggctgctccagctcatttattcagggcgtctccgcctgccactggatgctcttcctgctcatctccttgtggccagtggccttcaaatgtggcaggtagtagatcagtgctcagaaattcttagagaattagaaacttcaggtggtggaatttcagcccgtggaggaaactcctaccatgcccttctttccactacatcctctacaggaggctggtgcattcgctcttcgcctttccagaccccagtacagtcctctgcttctactgaaagccctgcttccactgagagccctgtgggaggggagggaagtgaactgggagaagtgctgcaaattcaggtggaagaagaagaggaggaggaggaagatgatgatgatgaggaccaggggtcagccacactctctcagactcctcagccccagagagtatcaggggtttttccccgtcctcatggaccccacccactgcccatgactgctactccccgaaagcttccagagggtgagagtgcaccacttgagcttcctgcccctcctgcactgccccccaaaatcttctacattaagcaggaacccttcgagcctaaggaggagatatcaggaagcggaactcagcctggaggagcaaaggaggaaaccaaagtgttttctggaggggacactgaagggaatggggagctagggttcttgttgccttcagggccagggccaacatctgggggagggggtccatcctggaaaccagtggatcttcatgggaatgaaatcctgtcagggggtggaggacctgggggagcaggccaggccgtgcatgggcctgtgaagctaggggggacaccccctgcagatggaaaacgctttggttgcctgtgtgggaagcggtttgcagtgaagccaaagcgtgaccggcacatcatgctgaccttcagccttcggccttttggctgtggcatctgcaacaagcgcttcaagctgaagcaccatctgacagagcacatgaagacccatgctggagccctgcatgcctgtccccactgtggccgtcggttccgagtccatgcctgttttctccgccaccgggacctatgcaagggccagggctgggccactgcccactggacttacaagtgactgctgaggctatacactagcttctagaacaagataaccactgctgctgatggatacttttccctcactgccatggcacaccagtcatggatcttgtaatcatgccaagagaatagatacattatggacctcttgttcttagatatgggcctctcagcctggcagatgttgaaactcaaatttctcgtcccactccaggttttggctagccaaccctgcaggaaagtggtttataggccattcatacttaagttgatcacttgcccatggtggacatttttgtggtggtgatgtccattaaggaaaccagattttcaattatttagtgagagaagagttagagcaaaagacagtggtaaatgttttattccgtctccatgaggaattgaaggagttggtctccacctagagatacatttgatttacagcttaagtaattcagaggctaagctctaagcttttttctctcattgctggaatgatttaagcagaagtccttttgtgtacttttaaaattgtatctttccaggagcccctcagattgtaccttgctttctcaccaatagacaccttcccgacacttttttaatgttgtagctgagcactttaacaagttgagcattccatgtttcattcttagaaccttctttaatagagggtcttccctcaacagcctgtgcctctggtctacctttgaccaccactgataactaatatattggtcacaatgactggaatgtgactagtgatctcaggagatggcactgtcctaaagtgctgtcagggtggcaccactgctctctgaacaacttaccttggtcagagggactcaggtttgggacagcacaagctgaaggctggagagtaacttgcatagtaggaccatacctcttcctttcccatcccacccacatatgatagacagcccctctgttgagatatggaggggacagatactggaatcgggggtgggacttgcagttacttaaaattttttaataaactgtgccctgaaacctaaaaaagaaaaaaagaaccttagaaa

SEQ ID NO: 508 - DNA, 1308 bp, Homo sapiens
gtttgcgtcgacatggcggttaccctgagtctcttgctgggcgggcgcgtttgcgccgccgtcactcgctgtgggttcgcgacccggggggtggcgggcccaggccctattggccgggagccggaccccgattccgactgggagccggaggaacgggagctgcaggaggtggagagcaccctgaaacgacagaaacaagcaatccgattccagaaaattcggaggcaaatggaggcgcctggtgccccgcccaggaccctgacgtgggaagccatggagcagatacggtatttacatgaggaatttccagagtcctggtcagttcccaggttggctgaaggctttgatgtcagcactgatgtgatccgaagagttttaaaaagcaagtttttacccacattggagcagaagctgaagcaggatcaaaaagtccttaagaaagctgggcttgcccactcgctgcagcacctccggggctctggaaatacctcaaagctgctccctgcaggccactctgtatcaggctctttgcttatgccagggcatgaagcctcatctaaagacccaaatcacagcacagctttgaaagtgatagagtcagacactcacaggacaaatacaccaaggagaaggaagggaagaaataaagaaatccaggacctggaggagagctttgtgcctgttgctgcacccctaggtcatccaagagagctgcagaagtactccagtgattctgagagccccagaggaactggcagtggtgcgttgccaagtggtcagaagctggaggagttgaaggcagaggagccagataacttcagcagcaaagtagtgcagaggggccgagagttctttgacagcaacgggaacttcctgtacagaatttgagtcggggcttggcttatggagatgcctcgtgaaacacagctgggcaagtattaatgtatatggaacagcctggatttctgcatatggataagccaccttggaataggaagaggtgttgagcctggactgtgggaggaaagagctgcgtggatagattcaaacttcctgtggtagtgctcccagtctgacctctgtagaccttcagtactcactcttcttgcttaggctctctgtgtgttgaaagccatcccgtgttgcatgtgttgttacaattttctgtgatacttgcaatttatgtttgagaagaagtgaaaagtttgccttctgacctcatttccttcttgatcagtgaacactaacattttggggacaacttagtcaattggttttccttacaacaaaataaagtaaaatgtagcc

SEQ ID NO: 509 - DNA, 1381 bp, Homo sapiens
ctcacccccaccccctttttttggctttcagcaggactggctctgagcaggcgtaaaacagtgttaaaactgaatccgggcagcagggagctcctgtccacggcggcaggctctcacagtccaccgggctctcgcggtccacccagaccaccctttacctcgagtccttatgcacagaaaggccctgatatgtcccatacactcaggagttaggcccagagctgggcagtggtcactccacgccattccctctggtgtagagctggccctgcctgcccccagacggccgtggggtgggtggcaccgcttcctggggaaccccttcccacacttctggccttgtttctcacccacacaaggacaccccagtggtcactgctgcagctcgcggtcacatagagggtgagaggggagagctggacaaacaggtgacccagcagacccagcctgatgcccgcaggagagagcaacggggtctgatattttgtctccaaatgaaagagccacagtgaaaccccaggcctgccaaccccagttgtagggccagagaacagggatgtttccctgaggcggtggcaaggtttggtttggtgaaaacgaaggatatgtgagggtctgagaggggagggtgactggcctagactccacccctggcgccctgtccaccgtggctggctggccactctcggacccctcggcgtcaagcgctgactgggtgcctgcctggggcttggggctctgtacgtgttaattctgccactccagcagccctgagtgggaggagccattatcccccttctttctgtagatggggaaactgaggcaggcttgcccatggtgaagtggccagtcggacacagggccagattgaaacctgcagcctgggctcccggctacaacagcgccagcctccacaggcattagaaggggactcactgcgagggccccagccagggcagctttcagggtggggtctctggcctcaccctggggaaacagccggggcgctggctgcctcctgctgagcctggcgtgggaacaatgtggcctctatccctggagcgagccaggccgcctggacgcccagcccttcagagcagcccggccaggcaggcgcccacagcatggcgcccgggccgcgctgtccgtccacggggtgcgggcgccttggccaggcccaggcaagccgctccccgtgtcctccctggctggccactgagtggccagacgccggcttcctcctccctctcccgcccggccagcctcctccttttttggtggtgggtttgggggcccagcccacccgccactgccacgtctgccatcctcccgcacccacgagcatctttcaaaaattcccggtgggcggggctgagctgca

SEQ ID NO: 510 - DNA, 1514 bp, Homo sapiens
gatttacttaactgaatcttataacaattcgaggtgaactgtggcaatgaaaaccagaaacagttaatgagatgcttcagctcacagtttgaagtgctgagaacctaagtattttgctgtacggtactgagctgtaccaaaatatgatggtttaggtttatgtgcaagactttgtgttgtagtctagacaaaggggtgggcaagagacatgcaaagctgaagccctgcttgaaaagacccttcaaggaagtaaaatggcaggggcagagtgcagcttaacatgttgctatccctgttgtttttgagttggttttggaatggattcaagttcttacacaatttattttgaatacaagcataatctaggtgatttgagttaatgaacttcttttcatgatgtagggaaagttgaatgtatatatttctaagaagaatttgtttagcagattacaagttggcaaaatagactgttcacagaaactaggcaaaaatttaagaaaacattctagtctctaaaacccattactaatgattaacattaaaatatttgtaactcttagaaagggggcattactaagacgactttaacttgttatgaaatctttgttgtgtgatgcaggtacagtgcgcccattccaactggaatagcagtttgattttaattgtaaaactaaacttcgggaatatgtatgcccaaagtaagtaggatgagaatagtatacatgggatatggtccaatgaatttaagccccaagatacagctaaatacatttatgatttcataaaatctagtttagatagcattgtgatgcaatttccagaaatccatttgtgtttagagtaaataccatgtttagaagatgttttgtggtttggatttatatatttgtaaggtttttttaaaaaaatgttcgttttgtttgaaatgtaacattgagtaaattggtgagttatataatgagatttctagaaagctctggacatgggtacgatgtgttttgcttctctgtataatgtctacagtgataaacttgtgtctccgtgtattgtggcagtctttttttctagttaatttggctttagagagcaatctttgtatgacaccagaaaactcttcatgctattgaatgataaaaagataatgctttaatattttattcactgtgatactattttgtttgtctattaaattgttattatttccaaatttagaagtttgatttctctgacttatggttaaaattcagttatgactttgcacctctgttagctttagataacggcaaacatgaacattcagaaacgttggttcagctaatgcctttatcatgcccgtgaagacttcagaactttccaacaaaggggacctaacccatcacacttttaaaaggccttcatagtttttttattttattttattttattttattttattttattttattttatttatttattttaaagcaggggagaaaaattaggggagatgaaataaaaatatcatctttcttaat

SEQ ID NO: 511 - DNA, 1872 bp, Homo sapiens
tgataaaatagctttatcctctgtcagaacacaaacaaacaaactttgagaggggaggaaggaaggtctagctcagggctcacttaggagagggatgagattagaaagttcaacacactgcttgtgcagcggagataaagtcaagaccctagcacccacttataaatatctcgttatattaaaaaaaaaaaaaatgtccagggcccacctggctctgctcctgcacagaaagggttcatcttcactttgtgatctcacaggtcatggagtgagggtggtagagaggggcagaaatttcagggggaggggtggctgggaaaaagtaaaggggacaagccaatgtgtaactagcgctctccaagacatgcagaggagtgggggtggcctgtcaggggctgaaaagaaaagccagtgctgtacctggggggttgtctcactcctgtccccacaatccctgatactccggagtgatctgtcctttcagacacccactgtgaggtcccaatatcggggtttatcctttcctcagtcccagcctgttcagctctccaaccaagttttgggggcccctctaatgggggggatggccccagttgcttaggcctctgaggtcaacccctttacatcacagccctctccccaaataagaagcatgaggtgagctggaggaccctccctgggaggagggtgttctggggggtgagccagttttggggtcccccttcagtccctgaccaggcggtaaatgtgatgctgggccccacgctcgctggtggagacctcgaagacataggcggtgcagagcagcagttcctgggtgtctctgtttgtcaccacctggaggatggtgaagttttccaggacgctgttcatcatgtatcgctcaggcagctgccgcaacttgtgcaagaaattcaccaggtactcgcacatgggcgagcgcagcaggcggtacacaaatctgccgtcctccagctgggcccgttccgtctccaccttctccaccacctgcttgccaaaagagcagaccttggaggaacaggtgagggtcatgtgttccaggctctcatactggctgctcactccgtagaagccaccactgctgatgctgccaccggcccctgcctcctcaccacttgggccccagttcaggtccgcccagaacttgaccaggaagaaggcatggggggggccacgatcatatagctctcggaggccaccctttttctcagggaatttgtcgtagatctgccggacgtccacactctcgagcggcggcgctccggggctggggcagtgctggctgatgtgcacgaacaggtgcctctggtaagaatcaactgcatctggcggttccacgaaggctgagaactctaccagctgcaaccgggcggtgcccaggccccgagcctgccaggctgggggcgatggggtaggtgggggcaggggtgagagggcttgggggggctcgtaccctgggaggtcagtagatgggggagtcagtgacaaggtgaacggtgtctgtgagaatggcttcacatctggaacattccaggggggcccagatcctccagaccaaaactggaaaagctcagaggcctgaggaccagtgggacccagtttggcctgcagagaaggcgcggagatgagctgggcagaggacatggttgccattgtctggaaagccttgtccttggaaacctggtccttcaacttggactggatttcccttgatttccttcgggccaaaacctggatgtgactagaaacctgttttcgagttcgggtcttccccgttctcagcttgatgtagcgggcgatcagttcattccgaccatacatcttgccttcatcagacaaaattattttccg

SEQ ID NO: 512 - DNA, 1195 bp, Homo sapiens
ctcggagctacccaggcggctggtgtgcagcaagctccgcgccgaccccggacgcctgacgcctgacgcctgacgcctgtccccggcccggcatgagccgctacctgctgccgctgtcggcgctgggcacggtagcaggcgccgccgtgctgctcaaggactatgtcaccggtggggcttgccccagcaaggccaccatccctgggaagacggtcatcgtgacgggcgccaacacaggcatcgggaagcagaccgccttggaactggccaggagaggaggcaacatcatcctggcctgccgagacatggagaagtgtgaggcggcagcaaaggacatccgcggggagaccctcaatcaccatgtcaaaacccggcacctggacttggcttccctcaagtctatccgagagtttgcagcaaagatcattgaagaggaggagcgagtggacattctaatcaacaacgcgggtgtgatgcggtgcccccactggaccaccgaggacggcttcgagatgcagttttggcgttaaccacctgggtcactttctcttgacaaacttgctgctggacaagctgaaagcctcagccccttcgcggatcatcaacctctcgtccctggcccatgttgctgggcacatagactttgacgacttgaactggcagacgaggaagtataacaccaaagccgcctactgccagagcaagctcgccatcgtcctcttcaccaaggagctgagccggcggctgcaaggctctggtgtgactgtcaacgccctgcaccccggcgtggccaggacagagctgggcagacacacgggcatccatggctccaccttctccagcaccacactcgggcccatcttctggctgctggtcaagagccccgagctggccgcccagcccagcacatacctggccgtggcggaggaactggcggatgtttccggaaagtacttcgatggactcaaacagaaggccccggcccccgaggctgaggatgaggaggtggcccggaggctttgggctgaaagtgcccgcctggtgggcttagaggctccctctgtgagggagcagcccctccccagataacctctggagcagatttgaaagccaggatggcgcctccagaccgaggacagctgtccgccatgcccgcagcttcctggcactacctgagccgggagacccaggactg

SEQ ID NO: 513 - DNA, 1365 bp, Homo sapiens
gccaaattagaagtatcttcttcatgtggaccccagtgtcataagggaactccactgcccacttacgaagaggccaagcaatatctgtcttatgaaacgctctatgccaatggcagccgcacagagacgcaggtgggcatctacatcctcagcagtagtggagatggggcccaacaccgagactcagggtcttcaggaaagtctcgaaggaagcggcagatttatggctatgacagcaggttcagcatttttgggaaggacttcctgctcaactaccctttctcaacatcagtgaagttatccacgggctgcaccggcaccctggtggcagagaagcatgtcctcacagctgcccactgcatacacgatggaaaaacctatgtgaaaggaacccagaagcttcgagtgggcttcctaaagcccaagtttaaagatggtggtcgaggggccaacgactccacttcagccatgcccgagcagatgaaatttcagtggatccgggtgaaacgcacccatgtgcccaagggttggatcaagggcaatgccaatgacatcggcatggattatgattatgccctcctggaactcaaaaagccccacaagagaaaatttatgaagattggggtgagccctcctgctaagcagctgccagggggcagaattcacttctctggttatgacaatgaccgaccaggcaatttggtgtatcgcttctgtgacgtcaaagacgagacctatgacttgctctaccagcaatgcgatgcccagccaggggccagcgggtctggggtctatgtgaggatgtggaagagacagcagcagaagtgggagcgaaaaattattggcattttttcagggcaccagtgggtggacatgaatggttccccacaggatttcaacgtggctgtcagaatcactcctctcaaatatgcccagatttgctattggattaaaggaaactacctggattgtagggaggggtgacacagtgttccctcctggcagcaattaagggtcttcatgttcttattttaggagaggccaaattgttttttgtcattggcgtgcacacgtgtgtgtgtgtgtgtgtgtgtaaggtgtcttataatcttttacctatttcttacaattgcaagatgactggctttactatttgaaaactggtttgtgtatcatatcatatatcatttaagcagtttgaaggcatacttttgcatagaaataaaaaaaatactgatttggggcaatgaggaatatttgacaattaagttaatcttcacgtttttgcaaactttgatttttatttcatctgaacttgtttcaaagatttatattaaatatttggcatacaagagatcttagaaa

SEQ ID NO: 514 - DNA, 2908 bp, Homo sapiens
  misc_feature 2870: n = a,c,t, or g
tttttttttttttttttgggcctcgtgcttcgtggtgggagacccaggtcgaggtccggccgtagcacctccgcgccgtcgccatgtcgcggtttttcaccaccggttcggacatcgagtccgagtcgtccttgtccggggaggagctcgtcaccaaacctgtcggaggcaactatggcaaacagccattgttgctgagcgaggatgaaaaagataccaagagagttgtccgcagtgccaaggacaagaggtttgaggagctgaccaaccttatccggaccatccgtaatgccatgaagattcgtgatgtcaccaagtgcctggaaagagtttgagctcctgggaaaagcatatgggaaggccaaaagcattgtggacaaaaaaggtgtcccccggttctatatccgcatcctggctgacctagaggactatcttaatgagctttgggaagataaggaagggaagaagaagatgaacaagaacaatgccaaggctctgagcaccttgcgtcagaagatccgaaaatacaaccgtgatttcgagtcccatatcacaagctacaagcagaaccccgagcagtctgcggatgaagatgctgagaaaaatgaggaggattcagaaggctcttcagatgaggatgaggatgaggacggagtcagtgctgcaactttcttgaagaagaaatcagaagctccttctggggagagtcgcaagttcctcaaaaagatggatgatgaagatgaggactcagaagattccgaagatgatgaagactgggacacaggttccacatcttccgattccgactcagaggaggaagaagggaaacaaaccgcgctggcctcaagatttcttaaaaaggcacccaccacagatgaggacaagaaggcagccgagaagaaacgggaggacaaagctaagaagaagcacgacaggaaatccaagcgcctggatgaggaggaggaggacaatgaaggcggggagtgggaaagggtccggggcggagtgccgttggttaaggagaagccaaaaatgtttgccaagggaactgagatcacccatgctgttgttatcaagaaactgaatgagatcctacaggcacgaggcaagaagggaactgatcgtgctgcccagattgagctgctgcaactgctggttcagattgcagcggaaaacaacctgggagagggcgtcattgtcaagatcaagttcaatatcatcgcctctctctatgactacaaccccaacctggcaacctacatgaagccagagatgtgggggaagtgcctggactgcatcaatgagctgatggatatcctgtttgcaaatcccaacatttttgttggagagaatattctggaagagagtgagaacctgcacaacgctgaccagccactgcgtgtccgtggctgcatcctaactctggtggaacgaatggatgaagaatttaccaaaataatgcaaaatactgaccctcactcccaagagtacgtggagcacttgaaggatgaggcccaggtgtgtgccatcatcgagcgtgtgcagcgctacctggaggagaagggcactaccgaggaggtctgccgcatctacctgctgcgcatcctgcacacctactacaagtttgattacaaggcccatcagcgacagctgaccccgcctgagggctcctcaaagtctgagcaagaccaggcagaaaatgagggcgaggactcggctgtgttgatggagagactgtgcaagtacatctacgccaaggaccgcacagaccggatccgcacatgtgccatcctctgccacatctaccaccatgctctgcactcgcgctggtaccaggcccgcgacctcatgctcatgagccacttgcaggacaacattcagcatgcagacccgccagtgcagatcctttacaaccgcaccatggtgcagctgggcatctgtgccttccgccaaggcctgaccaaggacgcacacaacgccctgctggacatccagtcgagtggccgagccaaggagcttctgggccagggcctgctgctgcgcagcctgcaggagcgcaaccaggagcaggagaaggtggagcggcgccgtcaggtccccttccacctgcacatcaacctggagctgctggagtgtgtctacctggtgtctgccatgctcctggagatcccctacatggccgcccatgagagcgatgcccgccgacgcatgatcagcaagcagttccaccaccagctgcgcgtgggcgagcgacagcccctgctgggtccccctgagtccatgcgggaacatgtggtcgctgcctccaaggccatgaagatgggtgactggaagacctgtcacagttttatcatcaatgagaagatgaatgggaaagtgtgggaccttttccccgaggctgacaaagtccgcaccatgctggttaggaagatccaggaagagtcactgaggacctacctcttcacctacagcagtgtctatgactccatcagcatggagacgctgtcagacatgtttgagctggatctgcccactgtgcactccatcatcagcaaaatgatcattaatgaggagctgatggcctccctggaccagccaacacagacagtggtgatgcaccgcactgagcccactgcccagcagaacctggctctgcagctggccgagaagctgggcagcctggtggagaacaacgaacgggtgtttgaccacaagcagggcacctacgggggctacttccgagaccagaaggacggctaccgcaaaaacgagggctacatgcgccgcggtgctaccgccagcagcagtctcagacggcctactgagctctccactctgtttcccgcctgggccatccaaccttgaagtcngtaaaccacacctcagtcactaaaggtctgtttaaagt

SEQ ID NO: 515 - DNA, 1027 bp, Homo sapiens
gatttagatgttcaaaaatagatgaagggggagattggagaccaatagtgcaatttctgcgataccaacaaatagagtttataacatttttaggagccttaaaatcatttttaaaaggaacccccaaaaaaaattgtttagtattttgtggaccagcaaatacaggaaaatcatattttggaatgagttttatacactttatacaaggagcagtaatatcatttgtgaattccactagtcatttttggttggaaccgttaacagatactaaggtggccatgttataacatatatatgtccatatatatgtataaccaaaccacaggtgtttttttggaagtcatattatacagggagttgacagaggtgtgagctggactttaagaagctgcacataagatgctagtatgatcaagctggaatggacttagacaatttgaaacaacttttctcagttttcagatgaggaaactgacgggtaccaagcttaaatgacttgacgaagctcatagaagattagcaggtagtagaataatgactgctgactcctaattcagtggatcttccctggccaccgttttgtattgagctgcaatgcttccttgactgttctccacgccagattcttatcaatgatctttcacctaagaaacagcaaagattctggcaagcacacgatctagagatacatcttattgcgatttttcacaaaaaatcaaaagaagaaagaaggcttagctggtgtttaattattgttatttttttcaatagggaaatctgtacacaatgatttatctccagtgatttgccattgatcaatttttttctcatttcattttctatttttttgttttttgtttttctttattttttatttttttctcctttttctttttttaaattttctgtttatcacaaatgatcatgtaattatatgttaatactatgtaaccccagtgttttcaactgtttgtgtttcaatgttacccagttttcttttttttaattttaaataaatttgaaaaac

SEQ ID NO: 516 - DNA, 2216 bp, Homo sapiens
tttttttttttttttttttttttcaaactgatgttttacaattttatttcaaggttttagtaaataagaaagcatattgaatgatgttactatttcttgcaaaagcaagatgcttttttgcacctttgtaaatgtacaaataaatttgtaatactgcaaaatttgctggaaaatgtggttgatttcacctttattcttttcaatgttctcttggagcaggtgtgtactcactaagtatggctgtattgggatgggcgctccagaatactttcagagggaggtcagaaacacctggagtcagctccttccccagctttcacctgagcctgccaccacccccaccctctgcccaaaagaccagacccttctcctggcagcagccagagtgcttatttcccaaccagggcaggtcacagccctcctcaaagacctccaaccacacccctctaaccagacttcacagtcccccatgcacaccccgctctcctgacccctcaggctttccccactctgcccacccacccccacccctctgatccagcccttggcctcccagagcacctgctgacactgccccagggcgtttgcactgctgtgctgccttgctcaagcccccactctgttcaagtctcttgctcaatcatctgcccctcagcagtacctcctggcctgcgttatccacctctccagatactgtgcccacactcactcatgatttttctcctaggaagtagtactggcattacattgtctaacaccttttattattgctttgtctcctaggagaatggagaccttgaggaggcaggggagtcttccttgttgagaaatctatgcccagcatccagatgtcccgggagggcccatgggctctgggttgctgccctgtacccagagctcctcaagcgctccttggatctggtgacctggaatgggcactggggggcaggaagcatctgagtggctgtgacttggggcaagcctctgcctcattggtcccttggtcaggtgcaggggtgtggaatgatcctagtggggagacagcagaggactgtgtcaaagcccccctgggaatccccgatccagtagcctccttgggtgggttgcagggttgccggaagcttctcttcttcaggtgtcctgatccacccaagtccttgggtctaccaggtgctgccaggattgaagctaagacggtggggcacgcggtctgggtgtgtcgtgtcccacgatgggggacgtctctgggtccaggcctgcttggtcttccttaggctagaggcagggtgggggttgggtggttttggtccctttattgtctggggtgcaggcagccgcatggcacaaatctgcagtctctggggttgggaggaagaatcagagaacaacctgaggggaggtcctggaagtcccaggctcagctcccagggcgccctgggctcctgctccctgaaggggatgcggagggaagaagggccccgctgcgccagctgaggctggtttatctctaggaggtgaaggtccaacggcaggacacctgtgtgtgttcgctggaagtggcggctcaggacggggaacagggcaggacgcccggaggtggggagcaggataactccggagtggggcactcagggagcagcggacgcccccagcagcagcagggtcccggccagcagtggcagcgacgcggcaactgggtgcgcggcgtcggtggtgcaggcgggaggcgccaggtcgcaggccgtgtagggctccagacaggcagcgaaggccatgacatgcgctacgaagctctgctcctgcacaccatgcaccaggtgcgcctgcgggccgcgcgcaaacaccgccacgtcttcgcctccgtgggtctcggacgacaggggcaccgccgcctgctgctggtaatcggggctcccgctctcgctctcattcacgtctggtcgcacgcctgagttgaacacgtagcccgggccattgccgtacaggatggacgtgtaggctttgctgtcctgagccttgctgggggccaacccgaagatggagctccctcgcaaggtgtagccaccaaaggagaagacatgggagtggtcagcggtgacgagggtcagcgtgtcctcctcgctggtgagctggcccgccctctcaatggcgtcgtcgaacatgaccgcctcagtgagtgcctggtaagccacgccctcatgatgaccatggtcgat

SEQ ID NO: 517 - DNA, 1431 bp, Homo sapiens
aatctgtagatggcttgcaagagaatctggatgtggtagtgtctttagctgagagacattattataactgtgattttaaaatgtgctacaagcttacttctgtagtaatggagaaagatcctttccatgcaagttgtttacctgtacatatagggacgcttgtagagctgaataaagccaatgaacttttctatctttctcataaactggtggatttatatcctagtaatcctgtgtcttggtttgcagtgggatgttactatctcatggtcggtcataaaaatgaacatgccagaagatatctcagcaaagccacaacacttgagaaaacctatggacctgcatggatagcctatggacattcatttgcggtggagagtgagcacgaccaagcgatggctgcttacttcacagcagcacagctgatgaaagggtgtcatttgcctatgctgtatattggattagaatatggtttgaccaataactcaaaactagctgaaaggttcttcagccaagctctgagcattgcaccggaagacccttttgttatgcatgaggtcggcgtggttgcatttcagaatggagaatggaaaacagccgaaaaatggtttcttgatgctttggaaaaaattaaagcaattgggaacgaggtaacagttgacaaatgggaacctttgttgaacaacttggggcatgtctgcagaaaacttaaaaagtatgctgaggccttggattaccaccgtcaggcactggtgttgattcctcagaacgcatccacctactctgctattggatatatccacagtctgatgggcaactttgaaaatgctgtggactacttccacacagcccttggtcttaggcgagatgatacattttctgttacaatgcttggtcattgcatcgaaatgtacattggtgattctgaagcttatattggagcagacattaaagacaaattaaaatgttatgactttgatgtgcatacaatgaagacactaaaaaacattatttcacctccgtgggatttcagggaatttgaagtagaaaaacagactgcagaagaaacgggcttacgccattggaaacctcaaggaaaactccagattccagaccttccttggaagaaacctttgaaattgaaatgaatgaaagtgacatgatgttagagacatctatgtcagaccacagcacgtgactccagtcagtggtcctggtcccactgtcccagtgtaggttagtattccttcacatcctctccatggcttaagaatgtcccacttcctaacgtgactccaaactgcatctctacatttaggaacagagacccgccttaagagactggatcgcacacctttgcaacagatgtgttctgattctctgaacctacaaaatagttatccatagtggaataaagaaggtaacccatcc

SEQ ID NO: 518 - DNA, 1883 bp, Homo sapiens
aaaataaccgtccgcgacgccgagacaaaccggacccgcaaccaccatgaacagcaaaggtcaatatccaacacagccaacctaccctgtgcagcctcctgggaatccagtataccctcagaccttgcatcttcctcaggctccaccctataccgatgctccacctgcctactcagagctctatcgtccgagctttgtgcacccaggggctgccacagtccccaccatgtcagccgcatttcctggagcctctctgtatcttcccatggcccagtctgtggctgttgggcctttaggttccacaatccccatggcttattatccagtcggtcccatctatccacctggctccacagtgctggtggaaggagggtatgatgcaggtgccagatttggagctggggctactgctggcaacattcctcctccacctcctggatgccctcccaatgctgctcagcttgcagtcatgcagggagccaacgtcctcgtaactcagcggaaggggaacttcttcatgggtggttcagatggtggctacaccatctggtgaggaaccaaggccacctttgtgccgggaaagacatcacataccttcagcacttctcacattgtaactgctttagtcatattaacctgaagttgcagtttagacacatgttgttggggtgtctttctggtgcccaaactttcaggcacttttcaaatttaataaggaaccatgtaatggtagcagtacctccctaaagcattttgaggtaggggaggtatccattcataaaatgaatgtgggtgaagccgccctaaggattttcctttaatttctctggagtaatactgtaccatactggtctttgcttttagtaataaaacatcaaattaggtttggagggaactttgatcttcctaagaattaaagttgccaaattattctgattggtctttaatctcctttaagtctttgatatatattacttgttataaatggaacgcattagttgtctgccttttcctttccatcccttgccccacccatcccatctccaaccctagtcttccatttcctcccgccagtctccattgaatcaatggtgcaggacagaaagccagtcagactaatttccttctttcctcgcacttctccccactcgtcatcttttaactagtgttcacaaggatcctctgaaaccctctctgtgccccaagtacagatcccattacttctgctttcgtatctcctcaggcaaaagtggagggtgccttatgggccctcctcataggttgtctctgcatacacgaacctaacccaaatttgctttggtgccagaaaaactgagctatgtttgaacaaagatgtcgtgcaaactgtactgtgaacaacagttggtttaaaatatgaggggcaaggaggaggatgcatttcaaaagcttgattgatgtgttcagagctaaattaagaggagttttcagatcaaaaattggttaccattttttgtcagagtgtctgatgcggccactcattcggctccccagaattcctagactgggttgatagggtcatattgtgaatgtctcactacaaaatgacttgagtccagtgaaatctcattagggtttaagaatatttcagggatccttaatgttttgatttttgttttctgaaattggattttattttattttatcttataatttcagttcatctaaattgtgtgttctgtacatgtgatgtttgactgtaccattgactgttatggaagttcagcgttgtatgtctctctctacactgtggtgcacttaacttgtggaatttttatactaaaaatgtagaataaagactattttgaagatttgaataaagtgatgaagttgcattacacccc

SEQ ID NO: 519 - DNA, 693 bp, Homo sapiens
atcatgctgccgtgttccgtgtgggaagcgtgttgcaagaaggttgtgggaaaatcagcaagctctatggagacctaaagcacctgaagacgttcgaccggggaatggtctggaacacggacctggtggagaccctggagctgcagaacctgatgctgtgtgcgctgcagaccatctacggagcagaggcacggaaggagtcacggggcgcgcatgccagggaagactacaaggtgcggattgatgagtacgattactccaagcccatccaggggcaacagaagaagccctttgaggagcactggaggaagcacaccctgtcctatgtggacgttggcactgggaaggtcactctggaatatagacccgtgatcgacaaaactttgaacgaggctgactgtgccaccgtcccgccagccattcgctcctactgatgagacaagatgtggtgatgacagaatcagcttttgtaattatgtataatagctcatgcatgtgtccatgtcataactgtcttcatacgcttctgcactctggggaagaaggagtacattgaagggagattggcacctagtggctgggagcttgccaggaacccagtggccagggagcgtggcacttacctttgtcccttgcttcattcttgtgagatgataaaactgggcacagctcttaaataaaatataaatgaac

SEQ ID NO: 520 - DNA, 2024 bp, Homo sapiens
  misc_feature 862: n = a,c,t, or g
gacgtgtctggttattacacagatgcacagctggacgtgggatccacacagctcagaacagttggatcttgctcagtctctgtcagaggaagatcccttggacaagaggaccctgccttggtgtgagagtgagggaagaggaagctggaacgagggttaaggaaaaccttccagtctggacagtgactggagagctccaaggaaagcccctcggtaacccagccgctggcaccatgaacccagagagcagtatctttattgaggattaccttaagtatttccaggaccaagtgagcagagagaatctgctacaactgctgactgatgatgaagcctggaatggattcgtggctgctgctgaactgcccagggatgaggcagatgagctccgtaaagctctgaacaagcttgcaagtcacatggtcatgaaggacaaaaaccgccacgataaagaccagcagcacaggcagtggtttttgaaagagtttcctcggttgaaaagggagcttgaggatcacataaggaagctccgtgcccttgcagaggaggttgagcaggtccacagaggcaccaccattgccaatgtggtgtccaactctgttgcactacctctggcatcctgaccctcctcggcctgggtctggcacccttcacagaaggaatcagttttgtgctcttggacactggcatgggtctgggagcagcagctgctgtggctgggattacctgcagtgtggtagaactagtaaacaaattgcgggcacgagcccaagcctgcaacttggaccaaagcggcaccaatgtagcaaaggtgatgaaggagtttgtgggtgggaacacacccaatgttcttaccttaaangacaattggtaccaagtcacacaagggattgggaggaacatccgtgccatcagacgagccagagccaaccctcagttaggagcgtatgccccacccccgcatgtcattgggcgaatctcagctgaagccggtgaacaggttgagagggttgttgaaggccccgcccaggcaatgagcagaggacccatgttcgtgggtgcagccactggaggcatcttgcttctgctggatgtggtcacccttgcatatgagtcaaagctcttgcttgagggggcaaagtcagagtcagctgaggagctgaagaagcgggctcaggagctggaggggaagctcatctttctcaccaagatccatgagatgctgcagccaggccaagaccaatgaccccagagcagtgcagccaccagggcagaaatgccgggcacaggccaggacaaaatgcagacttttttttttttttttttttttgagatggagtctcgctctatcgcccaggatggagtgcagtggctcaatctcggctcactgcaaactccgcctcccgggttcacaccattctccggcctcagtctcccgagtagctgggactacaggcacctgccaccacgcccggctaatttttttgtattttcactggagacggggtttcactgtgttagccacgatggtctccatctcctggcctcgtgatctgcccacctcggcctcccaaagtgctgggattacaggcgtgagccaccgcgcctggccaaaatgcagacattttattagggggataaggagggcaaggtaaagcttatggaactgagtgttagtgactttggcatttgtgtagctgagcacagcaagggaggggttaatgcagatggcaagtgcaccaaggagaaggcaggaacactggagcctgcaataagggaggagaggggactggagagtgtggggaatgggaagaagtagtttactttggactaaagaatatattgggcgaagaatagaggggagcttgaaggaaccagcaatgagaaggccaggaaaagaaagagctgaaaatggagaaaaccagagttagaactgttggatacaggagaagaaacagcagctccactaccgacccccccccccaggtttgatgtccttccaagaataaagtctttccctggtg

SEQ ID NO: 521 - DNA, 1182 bp, Homo sapiens
ggaaaaaatgttttattcctctttgcacagagcagtttatgaaggtggttttctcctgactccatgcatcttttacacaaagatgcccccttaaatatgcccagttatctgccccacctcagtgctggagaactggcagttagtaagtggggcagaatgcttaagtctcaggaaggtttttaaaggcatttttgtggggaggaagttctgggtcaaggggaaagattagacccaagagtgagtattccattctccatcttcctggggaaatccaaaccccaaaggttttatgaagaaaagcacctctctcagcgacctagagacagggagagcacagacctactgcttgggtgtaaggctgaggcagagagagggtaggttgcagcgactgcagacccacggcagagagtaaatgcatgtcggggagctgaggggacagagacagcctagaggcccaagtcataagttccactccttccccagttctgagtagaaacttttcttcccaagactagaatggagttttagttttaggaactggctttgctccaggacacagagaagacaaaccaggcaacgatcccacaggtagtaagggtggacagttaaggtagctaactaagagatggacactcgccactgcagttttgaagctatatgccagatcagggtacagaatgcattttatatgccctgttcaatacaatttaaattgctgtttttccatgttgtcccttccctatgaactattcccaaagcctcttccaaggcagaggacagggcagtaagaaggaatggaagaaaacactgaggtcactaagtggggttagggcttagattggataaatccctacccatccccgcccccactcgttctatagaaaagaattctctttctctctccccttgctgggctgttgggatgagggccaggtagaggcaaagggaggaaaacactcagcacattctttctcctactttaatctgaagtgtagctacagcaaagggcacagaatttacaaaaatgtcagggcaagggagcatgtgagcataatccagtctagaaagaaagagggtgcttcccctgccctattatctaaatatgctgggagctttactcccagaactgcaagaagaatgaaaaagaataggaagggtgtaggggaggttgagccttagaaa

SEQ ID NO: 522 - DNA, 2489 bp, Homo sapiens
  misc_feature 2417,2422,2479: n = a,c,t, or g
ctcctaggaatgcttggtgctgaatctgctaaactgaataatcaggctcgctttatcttagagaaaatagatggcaaaataatcattgaaaataagcctaagaaagaattaattaaagttctgattcagaggggatatgattcggatcctgtgaaggcctggaaagaagcccagcaaaaggttccagatgaagaagaaaatgaagagagtgacaacgaaaaggaaactgaaaagagtgactccgtaacagattctggaccaaccttcaactatcttcttgatatgcccctttggtatttaaccaaggaaaagaaagatgaactctgcaggctaagaaatgaaaaagaacaagagctggacacattaaaaagaaagagtccatcagatttgtggaaagaagacttggctacatttattgaagaattggaggctgttgaagccaaggaaaaacaagatgaacaagtcggacttcctgggaaaggggggaaggccaaggggaaaaaaacacaaatggctgaagttttgccttctccgcgtggtcaaagagtcattccacgaataaccatagaaatgaaagcagaggcagaaaagaaaaataaaaagaaaattaagaatgaaaatactgaaggaagccctcaagaagatggtgtggaactagaaggcctaaaacaaagattagaaaagaaacagaaaagagaaccaggtacaaagacaaagaaacaaactacattggcatttaagccaatcaaaaaaggaaagaagagaaatccctggtctgattcagaatcagataggagcagtgacgaaagtaattttgatgtccctccacgagaaacagagccacggagagcagcaacaaaaacaaaattcacaatggatttggattcagatgaagatttctcagattttgatgaaaaaactgatgatgaagattttgtcccatcagatgctagtccacctaagaccaaaacttccccaaaacttagtaacaaagaactgaaaccacagaaaagtgtcgtgtcagaccttgaagctgatgatgttaagggcagtgtaccactgtcttcaagccctcctgctacacatttcccagatgaaactgaaattacaaacccagttcctaaaaagaatgtgacagtgaagaagacagcagcaaaaagtcagtcttccacctccactaccggtgccaaaaaaagggctgccccaaaaggaactaaaagggatccagctttgaattctggtgtctctcaaaagcctgatcctgccaaaaccaagaatcgccgcaaaaggaagccatccacttctgatgattctgactctaattttgagaaaattgtttcgaaagcagtcacaagcaagaaatccaagggggagagtgatgacttccatatggactttgactcagctgtggctcctcgggcaaaatctgtacgggcaaagaaacctataaagtacctggaagagtcagatgaagatgatctgttttaaaatgtgaggcgattattttaagtaattatcttaccaagcccaagactggttttaaagttacctgaagctcttaacttcctcccctctgaatttagtttggggaaggtgtttttagtacaagacatcaaagtgaagtaaagcccaagtgttctttagctttttataatactgtctaaatagtgaccatctcatgggcattgttttcttctctgctttgtctgtgttttgagtctgctttcttttgtctttaaaacctgatttttaagttcttctgaactgtagaaatagctatctgatcacttcagcgtaaagcagtgtgtttattaaccatccactaagctaaaactagagcagtttgatttaaaagtgtcactcttcctccttttctactttcagtagatatgagatagagcataattatctgttttatcttagttttatacataatttaccatcagatagaactttatggttctagtacagatactctactacactcagcctcttatgtgccaagtttttctttaagcaatgagaaattgctcatgttcttcatcttctcaaatcatcagaggccgaagaaaaacactttggctgtgtctataacttgacacagtcaatagaatgaagaaaattagagtagttatgtgattatttcagctcttgacctgtcccctctggctgcctctgagtctgaatctcccaaagagagaaaccaatttctaagaggactggattgcagaagactcggggacaacatttgatccaagatcttaaatgttatattgataaccatgctcagcaatgagctattagattcattttgggaaatctccataatttcaatttgtaaactttgttaagacctgtctacattgttatatgtgtgtgacttgagtaatgttatcaacgtttttgtaaatatttantatgnttttctattagctaaattccaacaattttgtactttaataaaatgttctaaacattncaaaaaaaaa

SEQ ID NO: 523 - DNA, 2354 bp, Homo sapiens
ggaaggaccatctgaaggctgcaatttgttcttagggaggcaggtgctggcctggcctggatcttccaccatgttcctgttgctgccttttgatagcctgattgtcaaccttctgggcatctccctgactgtcctcttcaccctccttctcgttttcatcatagtgccagccatttttggagtctcctttggtatccgcaaactctacatgaaaagtctgttaaaaatctttgcgtgggctaccttgagaatggagcgaggagccaaggagaagaaccaccagctttacaagccctacaccaacggaatcattgcaaaggatcccacttcactagaagaagagatcaaagagattcgtcgaagtggtagtagtaaggctctggacaacactccagagttcgagctctctgacattttctacttttgccggaaaggaatggagaccattatggatgatgaggtgacaaagagattctcagcagaagaactggagtcctggaacctgctgagcagaaccaattataacttccagtacatcagccttcggctcacggtcctgtgggggttaggagtgctgattcggtactgctttctgctgccgctcaggatagcactggctttcacagggattagccttctggtggtgggcacaactgtggtgggatacttgccaaatgggaggtttaaggagttcatgagtaaacatgttcacttaatgtgttaccggatctgcgtgcgagcgctgacagccatcatcacctaccatgacagggaaaacagaccaagaaatggtggcatctgtgtggccaatcatacctcaccgatcgatgtgatcatcttggccagcgatggctattatgccatggtgggtcaagtgcacgggggactcatgggtgtgattcaaagagccatggtgaaggcctgcccacacgtctggtttgagcgctcggaagtgaaggatcgccacctggtggctaagagactgactgaacatgtgcaagataaaagcaagctgcctatcctcatcttcccagaaggaacctgcatcaataatacatcggtgatgatgttcaaaaagggaagttttgaaattggagccacagtttaccctgttgctatcaagtatgaccctcaatttggcgatgccttctggaacagcagcaaatacgggatggtgacgtacctgctgcgaatgatgaccagctgggccattgtctgcagcgtgtggtacctgcctcccatgactagagaggcagatgaagatgctgtccagtttgcgaatagggtgaaatctgccattgccaggcagggaggacttgtggacctgctgtgggatgggggcctgaagagggagaaggtgaaggacacgttcaaggaggagcagcagaagctgtacagcaagatgatcgtggggaaccacaaggacaggagccgctcctgagcctgcctccagctggctggggccaccgtgcggggtgccaacgggctcagagctggagttgccgccgccgcccccactgctgtgtcctttccagactccagggctccccgggctgctctggatcccaggactccggctttcgccgagccgcagcgggatccctgtgcacccggcgcagcctacccttggtggtctaaacggatgctgctgggtgttgcgacccaggacgagatgccttgtttcttttacaataagtcgttggaggaatgccattaaagtgaactccccacctttgcacgctgtgcgggctgagtggttggggagatgtggccatggtcttgtgctagagatggcggtacaagagtctgttatgcaagcccgtgtgccagggatgtgctgggggcggccacccgctctccaggaaaggcacagctgaggcactgtggctggcttcggcctcaacatcgcccccagccttggagctctgcagacatgataggaaggaaactgtcatctgcaggggctttcagcaaaatgaagggttagatttttatgctgctgctgatggggttactaaagggaggggaagaggccaggtgggccgctgactgggccatggggagaacgtgtgttcgtactccaggctaaccctgaactccccatgtgatgcgcgctttgttgaatgtgtgtctcggtttccccatctgtaatatgagtcggggggaatggtggtgattcctacctcacagggctgttgtggggattaaagtgctgcgggtgagtgaaggacacatcacgttcagtgtttcaagtacaggcccacaaaacggggcacggcaggcctgagctcagagctgctgcactgggctttggatttgttcttgtgagtaaataaaactggctggtgaatgag

SEQ ID NO: 524 - DNA, 2912 bp, Homo sapiens
tttttttttttttttttctttaactttaaacagacctttagtgactgaggtgtggtttaggacttcaaggttggatggcccaggcgggaaacagagtggagagctcagtaggccgtctgagactgctgctggcggtagccaccgcggcgcatgtagccctcgtttttgcggtagccgtccttctggtctcggaagtagcccccgtaggtgccctgcttgtggtcaaacacccgttcgttgttctccaccaggctgcccagcttctcggccagctgcagagccaggttctgctgggcagtgggctcagtgcggtgcatcaccactgtctgtgttggctggtccagggaggccatcagctcctcattaatgatcattttgctgatgatggagtgcacagtgggcagatccagctcaaacatgtctgacagcgtctccatgctgatggagtcatagacactgctgtaggtgaagaggtaggtcctcagtgactcttcctggatcttcctaaccagcatggtgcggactttgtcagcctcggggaaaaggtcccacactttcccattcatcttctcattgatgataaaactgtgacaggtcttccagtcacccatcttcatggccttggaggcagcgaccacatgttcccgcatggactcagggggacccagcaggggctgtcgctcgcccacgcgcagctggtggtggaactgcttgctgatcatgcgtcggcgggcatcgctctcatgggcggccatgtaggggatctccaggagcatggcagacaccaggtagacacactccagcagctccaggttgatgtgcaggtggaaggggacctgacggcgccgctccaccttctcctgctcctggttgcgctcctgcaggctgcgcagcagcaggccctggcccagaagctccttggctcggccactcgactggatgtccagcagggcgttgtgtgcgtccttggtcaggccttggcggaaggcacagatgcccagctgcaccatggtgcggttgtaaaggatctgcactggcgggtctgcatgctgaatgttgtcctgcaagtggctcatgagcatgaggtcgcgggcctggtaccagcgcgagtgcagagcatggtggtagatgtggcagaggatggcacatgtgcggatccggtctgtgcggtccttggcgtagatgtacttgcacagtctctccatcaacacagccgagtcctcgccctcattttctgcctggtcttgctcagactttgaggagccctcaggcggggtcagctgtcgctgatgggccttgtaatcaaacttgtagtaggtgtgcaggatgcgcagcaggtagatgcggcagacctcctcggtagtgcccttctcctccaggtagcgctgcacacgctcgatgatggcacacacctgggcctcatccttcaagtgctccacgtactcttgggagtgagggtcagtattttgcattattttggtaaattcttcatccattcgttccaccagagttaggatgcagccacggacacgcagtggctggtcagcgttgtgcaggttctcactctcttccagaatattctctccaacaaaaatgttgggatttgcaaacaggatatccatcagctcattgatgcagtccaggcacttcccccacatctctggcttcatgtaggttgccaggttggggttgtagtcatagagagaggcgatgatattgaacttgatcttgacaatgacgccctctcccaggttgttttccgctgcaatctgaaccagcagttgcagcagctcaatctgggcagcacgatcagttcccttcttgcctcgtgcctgtaggatctcattcagtttcttgataacaacagcatgggtgatctcagttcccttggcaaacatttttggcttctccttaaccaacggcactccgccccggaccctttcccactccccgccttcattgtcctcctcctcctcatccaggcgcttggatttcctgtcgtgcttcttcttagctttgtcctcccgtttcttctcggctgccttcttgtcctcatctgtggtgggtgcctttttaagaaatcttgaggccagcgcggtttgtttcccttcttcctcctctgagtcggaatcggaagatgtggaacctgtgtcccagtcttcatcatcttcggaatcttctgagtcctcatcttcatcatccatctttttgaggaacttgcgactctccccagaaggagcttctgatttcttcttcaagaaagttgcagcactgactccgtcctcatcctcatcctcatctgaagagccttctgaatcctcctcatttttctcagcatcttcatccgcagactgctcggggttctgcttgtagcttgtgatatgggactcgaaatcacggttgtattttcggatcttctgacgcaaggtgctcagagccttggcattgttcttgttcatcttcttcttcccttccttatcttcccaaagctcattaagatagtcctctaggtcagccaggatgcggatatagaaccgggggacaccttctttgtccacaatgcttttggccttcccatatgcttttcccaggagctcaaactcttccaggcacttggtgacatcacgaatcttcatggcattacggatggtccggataaggttggtcagctcctcaaacctcttgtccttggcactgcggacaactctcttggtatcttcttcatcctcgctcagcaacaatggctgtttgccatagttgcctccgacaggtttggtgacgagctcctccccggacaaggacgactcggactcgctgtccgaaccggtggtgaaaaaccgcgacatggcgacggcgcggaggtgctacggccggaccagctgagcccgcgagcggccaaagaggcctagaaa

SEQ ID NO: 525 - DNA, 586 bp, Homo sapiens
acagccgcctgctgctcccacttcagctcagtgctggcccagaacaggtttctcctggagctacagataagcaacaacaggctggaggatgcgggcgtgcgggagctgtgccagggcctgggccagcctggctctgtgctgcgggtgctctggttggccgactgcgatgtgagtgacagcagctgcagcagcctcgccgcaaccctgttggccaaccacagcctgcgtgagctggacctcagcaacaactgcctgggggacgcgggcatcctgcagctggtggagagcgtccggcagccgggctgcctcctggagcagctggtcctgtacgacatttactggtctgaggagatggaggaccggctgcaggccctggagaaggacaagccatccctgagggtcatctcctgaagctcttcctgctgctgctctccctggacgaccggcctcgaggcaaccctggggcccaccagcccctgccatgctctcaccctgcatatcctaggtttgaagagaaacgctcagatccgcttatttctgccagtatattttggacactttataatcattaaagcactttcttggc

SEQ ID NO: 526 - DNA, 2084 bp, Homo sapiens
ggatttaatgagctgatccacgtcaagggcttagcagtgccagccgcacggcacgcaggaggctctctccagccatgttgctcgaggctgcacagtgggttctgaccgtggagtttgaagcctccctaccccaggagccttgggccgtggctacagcattgcaggtggctgtgaggctgtagatgtgggtgcactggtgtgccagtcctcggtttgtgcacgccaggtggatcagctcaagctcaaagtgagtcggctggaggaagagtgtgcactgcttcgaagggccaggggcccgccccctggggcagaggagaaggagaaggagaaggagaaggagccagacaatgtggaccttgtctctgagctgcgtgctgataaccagcggctgacggcgtcactgcgggagttgcaggagggcctgcagcaggaggcgagccggccgggggccccgggctccgagcgcatcctgctggacatcctagagcatgactggcgggaggcgcaggacagcaggcaggagctgtgccagaagctgcatgccgtgcagggggagctgcagtgggccgaggagctgcgcgactcagatgttgacggaggcacccttctaggcgcttgagatgccgctgtgagcagaacagagtacctgcaggagatggaagacctgcggctcaagcaccgcacgctgcagaaggactgtgacctgtacaagcaccgcatggccactgtcctggcccaactggaggagattgagaaggagcgagaccaggccatccagagccgtgaccggatccagttgcagtactcacagagcctcatcgagaaggaccagtaccgcaagcaggtgcggggcctggaggcggagcgggatgagctgctgacaacgctcaccagcctggagggcaccaaggctctgctggaggttcagctgcagcgggcccagggtggcacctgcctcaaggcctgtgcctcctcccattccctgtgctccaacctcagcagcacttggagcctgagcgagttcccctcccctctgggaggcccagaagcaactggggaggcagctgtcatggggggacctgagcctcacaactcggaggaagccacagacagtgaaaaggagatcaatcggctctccatcctgccttccccccagtgccggctccatcctccgccggcagcgtgaggaagaccccgcaccccctaagagatccttcagcagcatgtcagacatcacagggagtgtgacacttaagccctggtcccctggcctctcttcgtcctcatcctctgacagcgtgtggcctttgggaaagccggaaggcctcctggctcgggctgtggcctggacttcctcaacaggtctctggctattcgggtgtctggccggagccccccagggggcccagagccgcaggacaagggaccagatggactgtcgttttatggggacagatggtctggggctgtggtgcgcagggtgctgtctgggcctgggtccgccaggatggaaccaagagagcaaagggtggaagctgctggtctggagggggcgtgcctggaagccgaggccaagcagagaaccttgctctggaatcaggggtccacactcccctccctgatggactcgaaggcctgccagtccttccacgaggccctagaagcctgggcaaagggaccaggtgccgagcccttctacattcgtgccaacctcaccttgcctgagagggcagatccccatgccctttgcgtgaaagcccaagagatccttcgactggtggactcggcatacaagcggaggcaggaatggttctgcacccgggttgaccccctcactctgcgggacctggaccggggcaccgtgcccaattatcagagagcccagcagctcctagaagttcaggagaaatgcctgccctccagccggcaccgaggcccccgcagtaatctgaagaagagagccctggacagctgcggctggtgaggcccaagcccgtgggggcgcctgcaggggactccccggatcagctgctgctggagccctgtgcagagccggagcggagcctcagaccctacagtttggt

SEQ ID NO: 527 - DNA, 702 bp, Homo sapiens
tgcccctcctcaagagcaaaagcaaatgttgggtgaacggctgtttcctcttattcaagccatgcaccctactcttgctggtaaaatcactggcatgttgttggagattgataattcagaacttcttcatatgctcgagtctccagagtcactccgttctaaggttgatgaagctgtagctgtactacaagcccaccaagctaaagaggctgcccagaaagcagttaacagtgccaccggtgttccaactgtttaaaattgatcagggaccatgaaaagaaacttgtgcttcaccgaagaaaaatatctaaacatcgaaaaacttaaatattatggaaaaaaaacattgcaaattataaaataaataaaaaaaggaaaggaaactttgaaccttatgtaccgagcaaatgccaggtctagcaaacataatgctagtcctagattacttattgatttaaaaacaaaaaaacacaaaaaaatagtaaaatataaaaacaaatttatgttttatagaccctgggaaaaagaattttcagcaaagtacaaaaatttaaagcattcctttctttaatttgggaattctttcctgtggaatagctcagaatgtcagttctgttttaagtaacagaattgataactgagcaaggaaacgtaatttggattataaaattcttgctttaataaaaattccttaaacagtgg

SEQ ID NO: 528 - DNA, 2697 bp, Homo sapiens
tttttttttgttttttttttttttttttttaaatttcaagacaactttatccagacaggcgcctctcaaatagaacacagggaagttaggcagcagttactaaaatacagtctcgccaaatgatttacaacagaacacaacaggagcaggggatctgtgggtggggctgggctgggccctctatctcacagggcctgagtcaagccagcccgccctgcaaggcaggggctgacctgcaagcggagatctcacttcctcttaccccaaattcatacctccattttccccgcccccatctctccccagggtcctcaagtgggaaagggagaggtagcatccctcggatccaggcccactccactccgtctccggcaccagtgggcaggctgagtctgggcctcaaggggccctgggcttagggtatctatggcagtaggaaaatgacatggacaggctcttcaggggtaggctaaagtcctctggccagcagtacccagagaaaatgggcagcagcaggtaaaccagccaggaggtggagtcctctgaacccacagcagaccccaccctcctgcccagcccctgcccacattgggggtcaggaccactgagactctggtcaggacagtgggtgctctcagcagtgtggcaagctcagagcagagctcccaaggaccataccacactggttcaaaacccataggtgacaccatcccaacagaagcttccatgggtgctggatcccagggctgcatcctgagcacaggtgggcagactggaacataacactaggacccaagggatccagaacattttaggcccatctcctgggctgctccagcctgttgccatgacttgggcagtgagtgggcctcctgccaggtggcagggcacagcttagaccaaacccttggcctcccccctctgcagctacctctgaccaagaaggaactagcaagcctatgctggcaagaccataggtggggtgctgggaatcctcggggccggctggcacccactcctggtgctcaagggagagacccacttgttcagatgcataggcctcaggcggttcaaggcagtcttagagccacagagtcaaataaaaatcaattttgagagaccacagcacctgctgctttgatcgtgatgttcaaggcaagttgcaagtcaaggcaagtgtcccagaggccctgggcagctgagtgcacctgtgtttgatcttcccctgatgatggacactcccagctgaccatccaaacaccaggaaaacatccccctttcctgggctcagttcctagtctacttgctggtacgaacccaacccacacactccccgcccacaatgcagctccttccaaatcctcccacaagccacctttgtgggacttggaagctgcttaggatgggccctgccctctgcgggaagccaatcctagcagaaaggtaagctaaacaacagtctcagaatctgagacccagtgactgttccccccgccccaggccttgggcctgaagtgggggcctgcctgtggcctctgtggtgggctcactcccacccccaacagtggccccaggagaggctttcccaagagtcttcaaactccacccaccccagccctagcatcagggactccccaccccccactggagtgttaatatcattaatgtacaaataagatccaaagatataccaaagatcgagaaacagctggctccgacctccctcccacagagccttcccagggttagctgaaaaagagccctttggcatctacagaagccagtcggagtttatggtttcatttgcccaaaaatacacctttggggacctcaaattctttccaagaatcactaccacacatatgaatttgaacattcgccacccttccaccatccatttctcgcaggaacttcaaaataaaaatggccagtctgcccccactctggctcctcgtctatggctgtctcttcttttccaggggctgcagttctgatgtgaatgatggtgccattccagcattgggcctctggcaggctgcatcacatgatggcacagcatgagttttgtttccgggcagttttatagaaggctttagactgtgttcccagcacctcggatttggacaccaagtcatctagcttctcacctcgctctaacagagactccatggtgttgtgcagaatgattttggtctcatctagttcggcctgcactttagtcatgggatcagcttctcgtgggttctggtatctactgaggtgaccatccagggctgggtaatggattgtagcaggggatcctactggccagtctatcctgtcgacttgcttggagaattcatctagtaccttctccagcaaggtaaaggccacccgggatgggtattcattgtcagcaatgaccacacctgcaagactatcattccggacgtagacgtggcacagatagtcttgttctttgacagaagctctagtgcctttcgatgagcgctccacaatcagttgactcgtgaaggtcatgaattcctgaacgctggatctctggaaaaagctgaaggaagacacatcgtatgcggctttgagcagcaccaccttggcctcgcctttgtagaggacgctgaggctgtacagcttcatggctccgcgccctcaggccgcccgcctgcccagctgcgggacccgttctcagggagcagc

SEQ ID NO: 529 - DNA, 2729 bp, Homo sapiens
ttaggcttccgaggatttggtagacagatcagaggcacgtttcccacaactgcgaagaggcgctgaggcaattctgcaagaagattttggggttttggaaaagaagctatggaaaacggaggggcaggcactctgcagataaggcaagtcctgcttttctttgttttgctgggaatgtctcaggcgggctctgaaactgggaactttttggtgatggaggaattgcagagcgggagctttgtaggaaatttggcaaagaccctgggactcgaggtgagtgagctgtcttcgcggggggctcgggtggtttctaatgataacaaagagtgtttgcagctggacacaaacactggggatttgctcctgagagaaatgctagacagggaggagctctgtggctccaatgagccttgtgtgctgtatttccaagtgttaatgaaaaaccccacgcagtttttacaaattgagctccaggtcagggatataaatgatcactctcccgtcttcttggaaaaagaaatgctcttagaaatcccagagaacagtcctgttggtgctgtgttcttgcttgaaagtgcaaaggatttagatgtaggaatcaatgctgtaaaaagctacacaataaatccgaactctcatttccacgttaaaataagagtcaatccagacaataggaaataccctgagttagttctggacaaggcgctggattatgaagagcgcccggagctcagtttcatcctcactgctctggatggcgggtcccctcccaggtctggaactgccttggtcagggtggtggttgtagatattaatgacaactcccctgagtttgagcaggctttttatgaggtgaagattctggagaatagcatccttggctccctggttgtgaccgtctcagcctgggatttagactctggaacaaacagtgaactatcctataccttttcccatgcctcagaagatattcgcaagacatttgaaattaatcaaaagtctggtgacattactttaacagcacctttggattttgaagcaattgagtcatactcaataatcattcaagccacagatgggggaggactttttggaaaatctacagtcagaattcaggtgatggatgtaaacgacaacgctcctgaaatcactgtgtcatcaattaccagtccaatcccagaaaacactccagagactgtggttatggttttcaggatacgagacagagactctggggacaacggaaagatggtttgttctatcccggaggacatcccattcgtgctaaaatcttcggtaaataattactacactttggaaacagagagaccgctggacagagagagcagagccgagtacaacatcatcatcaccgtcaccgacttggggacccccaggctaaaaaccgagcacaacataaccgtgctggtctccgacgtcaatgacaacgcccccgccttcacccaaacttcctacgccctgttcgtccgcgagaacaacagccccgccctgcacatcggcagcatcagcgccacagacagagactcgggcaccaacgcccaggtcaactactcgctgctgccgtcccaggacccgcacctgccctcgctcctggtctcatcaacgcggacaacggcacctgttgcctcaggtcgctggactacgaggcctgcaggggttccagttccgcgtgggcgccacagaccacggctccccggctttgagcagcgaggcgctggtgcgcgtgctggtgctggacgccaacgacaactcgcccttcgtgctgtacccgctgcagaacggctccgcgccctgcaccgagctggtgccctgggcggccgagccgggctacctggtgaccaaggtggtggcggtggacggtgactcgggccagaacgcctggctgtcgtaccagctgctcaaggccacggagcccgggctattcggcgtgtgggcgcacaatggcgaggtgcgcaccgccaggctgctgagcgagcgcgacgcggccaagcacaggctggtggtgctggtcaaggacaatggcgagcctccgcgctcggccaccgccacgctgcacgtgctcctggtggacggcttctcccagccctacctgcctctcccggaggcggccccggcccaggccaggccgactcgctcactgtctacctggtggtggcgttggcctcagtgtcgtcgctcttcctcttctcggtgctcctgttcgtggcggtgcggctgtgcaggaggagcagggcggccccggtcggtcgctgctcggtgcctgagggcccctttccaggacatctggtggacgtgagtggcaccgggaccctgtcccagagctaccactatgaggtgtgtgtgactggaggctccaggtcaaatgagttcaaatttctgaaaccaattatccccaacttcctaccccagagcacaggtagtgaagtcgaagaaaatcccccatttcagaataatttgggtttctgataaagaatgaaaaataaaacctgtgtttatgaatacatttataattaggaacttatcgtgaggtgcctgtaaagtagtatttttgatcacttcaaatacatactcttcaagtcaagaaataaatttctttacatagaaaaggatacagatttagtaccaagaacacttcacaaagcaggaaatgtgcatgtgtaatggtttatgtcaaacaattatgcttaatataaagtctattaagtggg

SEQ ID NO: 530 - DNA, 2833 bp, Homo sapiens
tgaaggcccccgctgtgcttgcacctggcatcctcgtgctcctgtttaccttggtgcagaggagcaatggggagtgtaaagaggcactatcaaagtccgagatgaatgtgaatatgaagtatcagcttcccaacttcaccgtggaaacacccatccagaatgtcattctacatgagcatcacattttccttggtgccactaactacatttatgttttaaatgaggaagaccttcagaaggttgctgagtacaagactgggcctgtgctggaacacccagattgtttcccatgtcaggactgcagcagcaaagccaatttatcaggaggtgtttggaaagataacatcaacatggctctagttgtcgacacctactatgatgatcaactcattagctgtggcagcgtcaacagagggacctgccagcgacatgtctttccccacaatcatactgctgacatacagtcggaggttcactgcatattctccccacagataaagagcccagccagtgtcctgactgtgtggtgagcgccctgggagccaaagtcctttcatctgtaaaggaccggttcatcaacttctttgtaggcaataccataaattcttcttatttcccagatcatccattgcattcgatatcagtgagaagactaaaggaaacgaaagatggttttatgtttttgacggaccagtcctacattgatgttttacctgagttcagagattcttaccccattaagtatgtccatgcctttgaaagcaacaattttatttacttcttgacggtccaaagggaaactctagatgctcagacttttcacacaagaataatcaggttctgttccataaactctggattgcattcctacatggaaatgcctctggagtgtattctcacagaaaagagaaaaaagagatccacaaagaaggaagtgtttaatatacttcaggctgcgtatgtcagcaagcctggggcccagcttgctagacaaataggagccagcctgaatgatgacattcttttcggggtgttcgcacaaagcaagccagattctgccgaaccaatggatcgatctgccatgtgtgcattccctatcaaatatgtcaacgacttcttcaacaagatcgtcaacaaaaacaatgtgagatgtctccagcatttttacggacccaatcatgagcactgctttaataggacacttctgagaaattcatcagctgtgaagcgcgccgtgatgaatatcgaacagagtttaccacagctttgcagcgcgttgacttattcatgggtcaattcagcgaagtcctcttaacatctatatccaccttcattaaaggagacctcaccatagctaatcttgggacatcagaggtcgcttcatgcaggttgtggtttctcgatcaggaccatcaacccctcatgtgaattttctcctggactcccatccagtgtctccagaagtgattgtggagcatacattaaaccaaaatggctacacactggttatcactgggaagaagatcacgaagatcccattgaatggcttgggctgcagacatttccagtcctgcagtcaatgcctctctgccccaccctttgttcagtgtggctggtgccacgacaaatgtgtgcgatcggaggaatgcctgagcgggacatggactcaacagatctgtctgcctgcaatctacaaggttttcccaaatagtgcaccccttgaaggagggacaaggctgaccatatgtggctgggactttggatttcggaggaataataaatttgatttaaagaaaactagagttctccttggaaatgagagctgcaccttgactttaagtgagagcacgatgaatacattgaaatgcacagttggtcctgccatgaataagcatttcaatatgtccataattatttcaaatggccacgggacaacacagtacagtacattctcctatgtggatcctgtaataacaagtatttcgccgaaatacggtcctatggctggtggcactttacttactttaactggaaattacctaaacagtgggaattctagacacatttcaattggtggaaaaacatgtactttaaaaagtgtgtcaaacagtattcttgaatgttataccccagcccaaaccatttcaactgagtttgctgttaaattgaaaattgacttagccaaccgagagacaagcatcttcagttaccgtgaagatcccattgtctatgaaattcatccaaccaaatcttttattagtggtgggagcacaataacaggtgttgggaaaaacctgaattcagttagtgtcccgagaatggtcataaatgtgcatgaagcaggaaggaactttacagtggcatgtcaacatcgctctaattcagagataatctgttgtaccactccttccctgcaacagctgaatctgcaactccccctgaaaaccaaagcctttttcatgttagatgggatcctttccaaatactttgatctcatttatgtacataatcctgtgtttaagccttttgaaaagccagtgatgatctcaatgggcaatgaaaatgtactggaaattaagggaaatgatattgaccctgaagcagttaaaggtgaagtgttaaaagttggaaataagagctgtgagaatatacacttacattctgaagccgttttatgcacggtccccaatgacctgctgaaattgaacagcgagctaaatatagaggtgggattcctgcattcctctcatgatgtaaataaggaagccagtgtaattatgttattctcaggcttaaaataaatcattaaagcccaaaaaaaaaaacttagaaa

SEQ ID NO: 531 - DNA, 2293 bp, Homo sapiens
cagctgccagctcccctaccatcatgcggaaaagcagcggcagccccgactctcagcactgtgcctcagatggctccacggagaccctggccatggttgtggtagagcctggggacacgctgtcctcccccgagttcgacagcggtcctttcagctcccagtctgatgagacctctctcagcaccactgcctcatctgccacgcccaccagtgagctgctgcccctgggtccggtggacggccgctcctgctccatggactctgcctacggcaccctctccccaacctccttacaagactttgtggccccaggcccaatggcagagctagtgcctcgggccccagagtccccacgagttccttcccctccaccctcgccccgtctccgccgccgcacccctgtccggctgttgagctgcccgccccacctgctcaagtctaagtccgaggccagcctcctccagctgctggcaggggctggcacccatgggacaccctctgcccccagccgcagcctgtcagagctctgcctggctgttccagccccaggtattaggactcagggctcccctcaggaagctgggcccagctgggattgccgaggggcccctagccctggcagcggtcctgggctagtcggctgcctggccggggaacctgcaggctcccacaggaagaggtgtggagacctgccctcgggggcctctcccagggtccagcctgagcccccaccaggggtctctgcccagcacaggaagctgaccctggcccagctctaccgaatcaggaccaccctgctgcttaactccacgctcactgcctcggaggtctgagcagagggaggcccccaagagtgccattgaccaagagacagcagacagcctgcctcctggggcgtgccggcacctgcttcagctactgcctcctgtatgcatgagccggatgctgggcaggatccctgcctacgcccgggcccgatttgcgctttgccggactggatggagtggaggaggcccaggccacagtaccaccccacctgcccaggcagcccctcgtcacctactccccgaagttaccagctcagctcgagtcttcagggctgggctcctaggctgcccatcccacttctaccctcactggcctccagtgggattcactcctgccctgcccccaccttcccagtcccacaggccacccctggcttgggctgggttctgtgaagttacgtatttattgagcttttggttcttttataaagacttgtctagactccactgggaagagtcctttgctttggggcccagtgactcggggcacttgagttcagggcggcctccttgtgttcctgtgctcctccacttgccacggatgggccacggatggagcttgccatgggaagcactgggaagtaatggggtgtggggtgccaccagaccaacacccccagacttccccaccttcagccaccatcagccaccatcagagcctctccccaggtgccccccggggattcagggctgaatctgcccagttcccacactcaggccagccctcttgggaaggtgggtcctccatgggggtcccttcaggaactttttttttttttttaatacagagtctcactctgtcacctaggttggagtgcagtggtgtgatgtcggctcactgcaacctctgcctcccgggttcaaacgattctcctgccccagccactctagtagctggaactgcaggtgtgcaccaccacgccgggctagtttttgtattttaagtagagacggcatttcaccatattggtcaggctggtctcgaactcctgaccccaagtgttctgcccgcctctgcctcccatagtgctagaattacaggctgagctactgcgcttggccccttgcggtacttttggcccaacctcctccatggctggggacgcggaggccgagagagaagtcacttgccctggctctaccttgaagtggttctcagggttggggcgagactcggggtggggaccgagatgcagctctatcctgtgcccctggtcgcagcaggcagcccagcgcttcgcgtgttctacttggcctgtccgctgccgcctaatgagctcaggtctaggccgagcagagggggcacctggtcggactcggttgggctcgggcggccccgcctccccccgcccgccaggcgggcccttctcgacggcgcggggcgggccctgcgcggggctgaaggcggaaccacgacgggcaggagccgggaagcccctgggtgcccgtcggagggctatggagca

SEQ ID NO: 532 - DNA, 972 bp, Homo sapiens
agaaaatcccccttgtgaagaagaatcagcagttcttgctttgtataaaacacttcaccagtatacgggaagtgccttgaaagaaataccatccggctggcatctgtggaggagtgtcagagctggaatcatgcctttcctgaagtgttctgctttattttttcattacttaaatggagttccttccccacccgacattcaagttcctggaacaagccattttgaacatttatgtagctatctttccctaccaaacaacctcatttgcctttttcaagaaaatagtgagataatgaattcactgattgaaagttggtgccgtaacagtgaagttaaaagatatctagaaggtgaaagagatgctataagatatccaagagaatctaacaaattaataaaccttccagaggattacagcagcctcattaatcaagcatccaatttctcgtgcccgaaatcaggtggtgataagagcagagccccaactctgtgccttgtgtgcggatctctgctgtgctcccagagttactgctgccagactgaactggaaggggaggatgtaggagcctgcacagctcacacctactcctgtggctctggagtgggcatcttcctgagagtacgggaatgtcaggtgctatttttagctggcaaaaccaaaggctgtttttattctcctccttaccttgatgactatggggagaccgaccagggactcagacggggaaatcctttacatttatgcaaagagcgattcaagaagattcagaagctctggcaccaacacagtgtcacagaggaaattggacatgcacaggaagccaatcagacactggttggcattgactggcaacatttataattattgcaccaccaaaaaacacaaacttggatttttttaacccagttggctttttaagaaagaaagaagttctgctgaatttggaaataaattctttatttaaactttcc

SEQ ID NO: 533 - DNA, 1127 bp, Homo sapiens
gtagttcttagttttattataaccttgtattttctggcaaaaatataaatctaaatgcatgatctctgggcacacagctcaagtatcagccttgagatgacctaagcagcaaaaatttggcctatttaattaaatgcacaggaggttgcagccgcatttattagaaaaatattatcctttggaaattcctttcttgaagattggctccagggcgttgttctttctgtttttatgcaattgcacttccttggcaggcagccaggcgctccggtgctcacaggccatgggacagtccagttcctgcagacccagcggggcatgggcggacagagccgcaccgtgaagcccgcctgttatttccatcgggtggtcctggagacgacacggctggggaaatgggtcaccggaactccacggcggccagacgcccatccaatttgcctgcgggaactcgctcttcaccttttcttcacaaacttctttctggaagcgttgggatttaagcgtctccgcccagctcccaaggtgctgtcccggacctgcagggtagctgagcggctggagatgtcattctcgacaaagggtgacaccccggcgatgtagtcaggggcgaacacgttggttttctgcctggccttttgggagagtcgcagctgagggaagcgctgatcctcggtgagatgggggttgatggcgtatttgccccctttgggagtgggaagcgagtaccggaggccgcgggggttcagcaccttggggttgcgggagaagtgcatgtgcagggtgccgtcgtcgctgacggtcacggacactttcttcagggtcttgttcccacagtgtgagcagaacactcggctcatgtcagacgttgtcttgaaacagccatgcagcgcaagatgtagctccgggcctcacgaatcagcatgccgttcaccgccagcacgtgcagccccatctgcagcagaacattctgcatggcgaagtctgtggtcaggcagccaacccgcacgtcctcggggacgtcacactgctccagctcctgctggatctgcttgatgttactgggggttatccagccacccccgtcgtcatcgctgtcatcttttctgtcttcaggcacttagaaa

SEQ ID NO: 534 - DNA, 1960 bp, Homo sapiens
gcgcggcgccgcggcgcggacaaggcgaaaccgccgcccggcggaggagaacaagaacccccaccgccgccggccccccaggatgtggagatgaaagaggaggcagcgacgggtggcgggtcaacgggggaggcagacggcaagacggcggcggcagcggctgagcactcccagcgagagctggacacagtcaccttggaggacatcaaggagcacgtgaaacagctagagaaagcggtttcaggcaaggagccgagattcgtgctgcgggccctgcggatgctgcttccacatcacgccgcctcaaccactatgttctgtataaggctgtgcagggcttcttcacttcaaataatgccactcgagactttttgctccccttcctggaagagcccatggacacagaggctgatttacagttccgtccccgcacgggaaaagctgcgtcgacacccctcctgcctgaagtggaagcctatctccaactcctcgtggtcatcttcatgatgaacagcaagcgctacaaagaggcacagaagatctctgatgatctgatgcagaagatcagtactcagaaccgccgggccctagaccttgtagccgcaaagtgttactattatcacgcccgggtctatgagttcctggacaagctggatgtggtgcgcagcttcttgcatgctcggctccggacagctacgcttcggcatgacgcagacgggcaggccaccctgttgaacctcctgctgcggaattacctacactacagcttgtacgaccaggctgagaagctggtgtccaagtctgtgttcccagagcaggccaacaacaatgagtgggccaggtacctctactacacagggcgaatcaaagccatccagctggagtactcagaggcccggagaacgatgaccaacgcccttcgcaaggcccctcagcacacagctgtcggcttcaaacagacggtgcacaagcttctcatcgtggtggagctgttgctgggggagatccctgaccggctgcagttccgccagccctccctcaagcgctcactcatgccctatttccttctgactcaagctgtcaggacaggaaacctagccaagttcaaccaggtcctggatcagtttggggagaagtttcaagcagatgggacctacaccctaattatccggctgcggcacaacgtgattaagacaggtgtacgcatgatcagcctctcctattcccgaatctccttggctgacatcgcccagaagctgcagttggatagccccgaagatgcagagttcattgttgccaaggccatccgggatggtgtcattgaggccagcatcaaccacgagaagggctatgtccaatccaaggagatgattgacatctattccacccgagagccccagctagccttccaccagcgcatctccttctgcctagatatccacaacatgtctgtcaaggccatgaggtttcctcccaaatcgtacaacaaggacttggagtctgcagaggaacggcgtgagcgagaacagcaggacttggagtttgccaaggagatggcagaagatgatgatgacagcttcccttgagctggggggctggggaggggtagggggaatggggacaggctctttcccccttgggggtcccctgcccagggcactgtccccattttcccacacacagctcatatgctgcattcgtgcagggggtgggggtgctgggagccagccaccctgacctcccccagggctcctccccagccggtgacttactgtacagcaggcaggagggtgggcaggcaacctccccgggcagggtcctggccagcagtgtgggagcaggaggggaaggatagttctgtgtactcctttagggagtgggggactagaactgggatgtcttggcttgtatgttttttgaagcttcgattatgatttttaaacaataaaaagttctcccc

SEQ ID NO: 535 - DNA, 1295 bp, Homo sapiens
  misc_feature 1208: n = a,c,t, or g
tttttactttttaaaaccagaacatttattgcatgactaatcgttgacattcttaagatgaactggatgctgcaacagctgccctcttgggtttaggtgttgttccttcacggaatccatgcctgaatctgcggtatacaatttttaggtgcctcattcgaccagttccggtggtatttcgtcttttagccttggcactccagttatactttctcttgcgcttggcagggtagccacatttgccacaggtcgacttctgaaggtggtaggccttagagccacagcggcggcacaacgtgtgcgtcttattgcgacgctttccaaacgatgacgttcccttcgtcatctcgcttctgcggcctcgcttaattcactttatttttcttgtataaaaaccctatgttgtagccacagctggagcctgagtccgctgcacggagactctggtgtgggtcttgacgaggtggtcagtgaactcctgatagggagacttggtgaatacagtctccttccagaggtcgggggtcaggtagctgtaggtcttagaaatggcatcaaaggtggccttggcgaagttgcccagggtggcagtgcagccccgggctgaggtgtagcagtcatcgataccagccatcatgagcagcttcttaggcacaggtgcggagacgatgccagtgcccctgggtgcagggatgaggcgtaccagcacagagccgcagcggcctgtcaccttgcaagggacagtgtggggcttgccgatcttgttcccccagtagcctctgcgcacggggacgatggagagcttggccaggatgatggccccacggatggcggtggccacctccttggagcacttaacacccagaccgacgtggccattgtagtccccgatagcaacaaatgccttgaacctggtgcgctggccggcacgggtctgcttctgcactggcataatcttcaaaacctcatccttgagagaggcccccaggaagaaatcaatgatctctgattccttaatgggcagggagaagagatagatctcctccagggacttgatcttcatgtccttgaccaagcggcccaacttggtgacgggcatccactccttatcctcggccttgcctccgcgagtccgcggcctcggccgccggccccgtccacggccgcgaccccggccccggatgccactgccgaaacctccgcggaancaccgcggttccccatcccagggccaccagggcccccgggcccccccgctgcaccggcgtcatccgccatttggtgtttcttagaaa

SEQ ID NO: 536 - DNA, 1411 bp, Homo sapiens
atccggtagccgagttcccccagcctcccggtgctgcgcgctgggctgaggttatggctcgcttcgcggccaggctgggcgcgcagggccggcgggtggtgttggttacgtcaggcggcaccaaggtcccactggaagcgcggccggtgcgcttcctggacaacttcagcagcgggcggcgcggtgcaacctcggccgaggccttcctagccgccggctacggggtcctgttcttgtatcgcgctcgctctgccttcccctatgcccaccgcttcccaccccagacttggctgtccgctctgcggccttcgggcccagccctttcgggcttgctgagcctggaggccgaggagaatgcacttccgggttttgctgaggctctgaggagctaccaggaggctgcggctgcaggcaccttcctggcagtagagttcaccactttggcggactatttgcatctgttgcaggctgcggcccaggcactcaatccgctaggcccttctgcgatgttttacctggctgcggctgtgtcagatttctatgttcctgtctctgaaatgcctgaacacaagatccagtcatctgggggcccactgcagataacaatgaagatggtgccaaaactgctttctcctttggttaaagattgggctcccaaagcatttataatttcctttaagttggagactgaccccgccattgtaattaatcgagctcggaaggctttggaaatttatcagcatcaagtggtggtggctaatatccttgagtcacgacagtcctttgtgtttattgtaaccaaagactcggaaaccaagttattgctatcagaggaagaaatagaaaaaggcgtagagatagaagagaagatagtggataatcttcagtctcgacacacagcttttataggtgacagaaactgaagtaaaaagcccttataggatcaaaaattgttcagggctcttagagatggtgaaaactacaaaaaaaaccatggctttcatatggacagataaaatgaaagaaagggaaaaggcagtggtgtgtaggcaaatatggtttggcatttgtcttttaatgacacctgatatgatgtcattttgattttgaaattgaacactagaactgttaatcacctttaaaaagaagagcttattgggaattatatattccttaaaatatacatgggggcctgaatgtcagccatctttatactatagaaaaaggattatggatgcatgaatggtcatgctttggagatcaaatattggttgaatgcctatgtatgtcaggccctgtgctgagccatgaggattaaaaagatgaataaacatatcttgtttaggaaatggatgtataaaaaaatcaagtgcaataaagtgtgtgtccaaaagctgacacaatggaaagg

SEQ ID NO: 537 - DNA, 1023 bp, Homo sapiens
cggacgcgtgggtgaagttaaaaccagaactgggaccctggaacttggggataaattgctcgcaatagataatatccggctggacaactgttccatggaagatgcagttcagatcctccagcaatgtgaagacctggtgaagctcaaaatccgcaaagatgaagataattcagatgagcaagaaagttccggagcaattatttacaccgtggagcttaaacgctacggggggccccttggcatcacaatttcaggaactgaagagccgtttgatcctataatcatttcaagcctcactaaagggggattagctgaaagaactggcgcaatccacataggagaccgaatcctagccatcaatagcagcagcttgaaagggaagcctctgagtgaagccatccatttgttacagatggcaggagagactgtcaccttgaaaattaagaaacagacagatgcccagtcagcatcgagccccaagaagttccctatttctagccatttgagtgacctgggggatgtggaggaggactcctcaccagcacagaagccaggcaagctctccgacatgtacccctccacggtgcccagtgtggacagtgctgtggattcatgggatgggtctgcaatagacaccagctatggaactgaaggcactagttttcaggcctcaggatacaatttcaacacctatgactggaggagtccaaaacagagaggcagcttgtccccagtcactaagcctcgaagccagacttacccagatgtggggctgagttatgaagactgggaccggtccacagccagtggttttgcaggggctgccgatagtgcagagacagaacaagaggagaacttctggtctcaagcgctggaggatttggaaacctgcggacagtcaggaattctgagagaactggaggcaacaatcatgtcggggagcacgatgagtttgaatcatgaggctccaacacctcgcagtcagctggggcgacaggccagcttccaggagcgcagcagctc

SEQ ID NO: 538 - DNA, 1333 bp, Homo sapiens
gaacatggacgttaatatcgccccactccgcgcctgggacgatttcttcccgggttccgatcgctttgcccggccggacttcagggacatttccaaatggaacaaccgcgtagtgagcaacctgctctattaccagaccaactacctggtggtggctgccatgatgatttccattgtggggtttctgagtcccttcaacatgatcctgggaggaatcgtggtggtgctggtgttcacagggtttgtgtgggcagcccacaataaagacgtccttcgccggatgaagaagcgctaccccacgacgttcgttatggtggtcatgttggcgagctatttccttatctccatgtttggaggagtcatggtctttgtgtttggcattacttttcctttgctgttgatgtttatccatgcatcgttgagacttcggaacctcaagaacaaactggagaataaaatggaaggaataggtttgaagaggacaccgatgggcattgtcctggatgccctagaacagcaggaagaaggcatcaacagactcactgactatatcagcaaagtgaaggaataaacataacttacctgagctagggttgcagcagaaattgagttgcagcttgcccttgtccagacctatgttctgcttgcgtttttgaaacaggaggtgcacgtaccacccaattatctatggcagcatgcatgtataggccgaactattatcagctctgatgtttcagagagaagacctcagaaaccgaaagaaaaccaccaccctcctattgtgtctgaagtttcacgtgtgtttatgaaatctaatgggaaatggatcacacgatttctttaagggaattaaaaaaaataaaagaattacggcttttacagcaacaatacgattatcttataggaaaaaaaaaatcattgtaaagtatcaagacaatacgagtaaatgaaaaggctgttaaagtagatgacatcatgtgttagcctgttcctaatcccctagaattgtaatgtgtgggatataaattagtttttattattctcttaaaaatcaaagatgatctctatcactttgccacctgtttgatgtgcagtggaaactggttaagccagttgttcatacttcctttacaaatataaagatagctgtttaggatattttgttacatttttgtaaatttttgaaatgctagtaatgtgttttcaccagcaagtatttgttgcaaacttaatgtcattttccttaagatggttacagctatgtaacctgtattattctggacggacttattaaaatacaaacagacaaaaaataaaacaaaacttgagttct

SEQ ID NO: 539 - DNA, 1110 bp, Homo sapiens
gtgtgcaagtcttcgtgtggacgtatgccttcatttctcttggagtagaattgctgaatcctatggacgatttcctgttcagtgtctccattttaagtgggattctttgcagcatcctggccgtgttgaagttcatgctggggaaggttctgaccagtagagcactcataacagatgggtttaactccctcgtgggtggcgtgatgggcttctccattcttctgagcgcggaagtgttcaagcatgactcggcggtctggtacctggacggcagcataggcgttctgatcggcctcaccatatttgcctatggggtcaaactcctcatcgacatggtgccgagggtgaggcagacacgtcactacgagatgtttgagtgaagggggccagcatccgcatgagaccattgagatgaggagtttccacataggcaaagggtgccaatatttaactgaacatctggtttctttttggaagttttctttcacatggtttgtcattacaagacaaggtctgcccagccaggtggatctaccttgcccccatcacctgccgcccccatcaaacatgttgggacaatgcccataggaatggacctccttccccgtctccagctgggactggtgtttttttagtctctggagtatgatggttctcatgggtaggatgagatctttggcagaaaggtcttcggtggtgctctgagcctgcgctgcataggactgagcagacccacctcctccagcttgggtggccctgccactcctggttccaagtctctcctttcctggcaggtcttaagggaagattgtacccctcaccctttacatacccagaatcatcagtatgtcacttcctaatttctatcagtgtatctcattatttcatactgttttactaatcctaagtctaaacagatttgctcaaaaggagaccattctattttttaaagtacttagtgatacacgtataagctttgcatggacgaattaaataagcacattgaccttttcttgtacattcagaacctgaacatccatgtgaaaactgggtccatttttgagagatgtgaaactacagtttatttgtaataaataaatataatctatc

SEQ ID NO: 540 - DNA, 144 bp, Homo sapiens
acaggctgaggggagaagagttggctacatgtttatgttaggggaggagggagtacattttagctatgtattcaaacagctaatagtttaatgttgctgcttataaacttaattttaggctgcattaataaaagtgtagtctcc

SEQ ID NO: 541 - DNA, 1069 bp, Homo sapiens
cggacgcgtgggtctactaaaaatacaaaaattagcagagatggggtttcaccatgttggccaggctggtctcaaactcctgactcgaagtgatccgcccaccttggcctcccaaagcgttgggattataggcatgagccatgtgcctggtccaccttggcctgttttgtttttctttccttgggctcagcaattcaaattctagttgttatttggtggaagcagtagcccaaccccagtttaggggaaggtagcacagggcagagccactgggcactttgtttccttggccctccgaagctcactgttgcaaatacccccaagcctttgctctaggccagatcttgtttggtgcaggtgatggagaacacagatgactcgggcatgggtcttggagatcttctgttcaaagtacagtgctggcactggggcacagagtgcccacgttagccccgggctctgatagagaggtaggaggcacgttcttggtcactgttccattgcagaccagacttgctggcctgaccacaagggagtggctgggaactcacagccagcatagggacatccccctgcagccttctgacctgcaatcaaggctggggaggggtttgcaggcaggaatatgctgacctttcaccctgccatcccatcccaaccccagctcactagccttcatatatgccttatacttggagtcacaggggccaaaggcctgagaccccaccctgcccccaaactggctaagacagctttcagttcctgactccccaacttggtctctgccctgaagcagggcactgaactctgggctgcttctctgtgtgtaaaatgggcacatcttcctaatctgttaatggtcagtggtgtccccaaggatagtgctggcttccatggaaaccctcactcctggagattccattccattttcaagtgtacagccacagcaaggagcccgacactgatttgatcgattctgtgacacaaaccccaccaattgttaatgcaagtttttatttggctgtatatacaatttaagctattaaaatttgtacaatatttacaaatt

SEQ ID NO: 542 - DNA, 1634 bp, Homo sapiens
ccgccatacgcgctctccctgtttagctcttctgttagaaatagtatctttgttttcctttgctgttcctcaatcccctactcttcaccccttgttttcacctattttgcgagaacccatccagatcccccttcccttcttcccctgccggcccagttatggcagagaacgatgtggacaatgagctcttggactatgaagatgatgaggtggagacagcagctgggggagatggggctgaggcccctgccaagaaggatgtcaagggctcctatgtctccatccacagctctggctttcgtgacttcctgctcaagccagagttgctccgggccattgtcgactgtggctttgagcatccgtcagaagtccagcatgagtgcatccctcaggccattctgggaatggatgtcctgtgccaggccaagtcgggcatgggaaagacagcagtgtttgtcttggccacactgcaacagctggagccagttactgggcaggtgtctgtgctggtgatgtgtcacactcgggagttggcttttcagatcagcaaggaatatgagcgcttctctaaatacatgcccaatgtcaaggttgctgttttttttggtggtctgtctatcaagaaggatgaagaggtgctgaagaagaactgcccgcatatcgtcgtggggactccaggccgtatcctagccctggctcgaaataagagcctcaacctcaaacacattaaacactttattttggatgaatgtgataagatgcttgaacagctcgacatgcgtcgggatgtccaggaaatttttcgcatgaccccccacgagaagcaggtcatgatgttcagtgctaccttgagcaaagagatccgtccagtctgccgcaagttcatgcaagatccaatggagatcttcgtggatgatgagacgaagttgacgctgcattgggttgcaacaatactacgtgaaactgaaggacaacgagaagaaccggaagctctttgaccttctggatgtccttgagttcaaccaggtggtgatctttgtgaagtctgtgcagcggtgcattgccttggcccagctactagtggagcagaacttcccagccattgccatccaccgtgggatgccccaggaggagaggctttctcggtatcagcagtttaaagattttcaacgacgaattcttgtggctaccaacctatttggccgaggcatggacatcgagcgggtgaacattgcttttaattatgacatgcctgaggattctgacacctacctgcatcgggtggccagagcaggccggtttggcaccaagggcttggctatcacatttgtgtccgatgagaatgatgccaagatcctcaatgatgtgcaggatcgctttgaggtcaatattagtgagctgcctgatgagatagacatctcctcctacattgaacagacacggtagaagactcgcccattttggaatgtgaccgtctgtccttcaggagaggacaccagggtgggggtgaaggagacactactgcccccacccctgacagcccccaccccatggcttccatcttttgcatcaccaccactcctgaacccccatttttgatttgtcaaaatttttttttaacaaaactaaaattg

SEQ ID NO: 543 - DNA, 473 bp, Homo sapiens
gggcaagtgtcgtggacttcgtactgctaggaagctccgtagtcaccgacgagaccagaagtggcatgataaacagtataagaaagctcatttgggcacagccctaaaggccaacccttttggaggtgcttctcatgcaaaaggaatcgtgctggaaaaagtaggagttgaagccaaacagccaaattctgccattaggaagtgtgtaagggtccagctgatcaagaatggcaagaaaatcacagcctttgtacccaatgacggttgcttgaactttattgaggaaaatgatgaagttctggttgctggatttggtcgcaaaggtcatgctgttggtgatattcctggagtccgctttaaggttgtcaaagtagccaatgtttctcttttggccctatacaaaggcaagaaggaaagaccaagatcataaatattaatggtgaaaacactgtagtaataaattttcatatgcc

SEQ ID NO: 544 - DNA, 642 bp, Homo sapiens
ctcgccacactccacggaagcaatatgaaatgatctgctgcagtgctctgagccctaggattcatctttcttttcaccgtaggtggcctgactggcattgtattagcaaactcatcactagacatcgtactacacgacacgtactacgttgtagctcacttccactatgtcctatcaataggagctgtatttgccatcataggaggcttcattcactgatttcccctattctcaggctacaccctagaccaaacctacgccaaaatccatttcactatcatattcatcggcgtaaatctaactttcttcccacaacactttctcggcctatccggaatgccccgacgttactcggactaccccgatgcatacaccacatgaaacatcctatcatctgtaggctcattcatttctctaacagcagtaatattaataattttcatgatttgagaagccttcgcttcgaagcgaaaagtcctaatagtagaagaaccctccataaacctggagtgactatatggatgccccccaccctaccacacattcgaagaacccgtatacataaaatctagacaaaaaaggaaggaatcgaaccccccaaagctggtttcaagccaaccccatggcctccatgactttttc

SEQ ID NO: 545 - DNA, 912 bp, Homo sapiens
ggctgataagaacgacaagtctgtgaaggatctggtcatcttgctttatgaaactgcgctcctgtcttctggcttcagtctggaagatccccagacacatgctaacaggatctacaggatgatcaaacttggtctgggtattgatgaagatgaccctactgctgatgataccagtgctgctgtaactgaagaaatgccaccccttgaaggagatgacgacacatcacgcatggaagaagtagactaatctctggctgagggatgacttacctgttcagtactctacaattcctctgataatatattttcaaggatgtttttctttatttttgttaatattaaaaagtctgtatggcatgacaactactttaaggggaagataagatttctgtctactaagtgatgctgtgataccttaggcactaaagcagagctagtaatgctttttgagtttcatgttggtttattttcacagattggggtaacgtgcactgtaagacgtatgtaacatgatgttaactttgtgtggtctaaagtgtttagctgtcaagccggatgcctaagtagaccaaatcttgttattgaagtgttctgagctgtatcttgatgtttagaaaagtattcgttacatcttgtaggatctactttttgaacttttcattccctgtagttgacaattctgcatgtactagtcctctagaaataggttaaactgaagcaacttgatggaaggatctctccacagggcttgttttccaaagaaaagtattgtttggaggagcaaagttaaaagcctacctaagcatatcgtaaagctgttcaaaaataactcagacccagtcttgtggatggaaatgtagtgctcgagtcacattctgcttaaagttgtaacaaatacagatgagttaaaag

SEQ ID NO: 546 - DNA, 759 bp, Homo sapiens
ctccactggtacacaggcgaggaaggccttcctccactggtacacaggcgagggcatggacgagatggagttcaccgaggctgagagcaacatgaacgacctcgtctctgagtatcagcagtaccaggatgccaccgcagaagaggaggaggatttcggtgaggaggccgaagaggaggcctaaggcagagcccccatcacctcaggcttctcagttcccttagccgtcttactcaactgcccctttcctctccctcagaatttgtgtttgctgcctctatcttgttttttgttttttcttctggggggggtctagaacagtgcctggcacatagtaggcgctcaataaatacttgtttgttgaatgtctcctctctctttccactctgggaaacctaggtttctgccattctgggtgaccctgtatttctttctggtgcccattccatttgtccagttaatacttcctcttaaaaatctccaagaagctgggtctccagatcccatttagaaccaaccaggtgctgaaaacacatgtagataatggccatcatcctaagcccaaagtagaaaatggtagaaggtagtgggtagaagtcactatataaggaaggggatgggattttccattctaaaagttttggagagggaaatccaggctattaaagtcactaaatttctattttgtgttgaacttgctgctttttttcatattgaaaagatgacatcgccccaagagccaaaaataaatgggaattg

SEQ ID NO: 547 - DNA, 1016 bp, Homo sapiens
ggtccatccctgcaccctggtcctctcccagcctctcccccacattgtccctgactctaggggcacatccagtctccatcgtgctgcagcagctggactgagggcagagcctgtaggtgcagaggccctggctcccgaggtccagccactctccctggggcctctggggtgagagcagcttccgataggacctgcccagatttctgcatgtgcacttttgtttactgaaagagagaaaggggggggtcacagcaacatgccctggcctttctgccctgttccccaaccccactgaggcctgctgcacaggtcaatgccttcgttatcgttattgtactgtcactttgttcttgaggtagtagtcaaggatcaggaggggcagatgtcttctctgggctgcgtggggccggagcagaggtgagcagcaatgcactggttcgggagcccccatcagcctccttgtgcaaactgggcccccatgccacagtctggctttccctccatctgccccaggacaagagcaagaaggacatcagttgcccagtcatgtgatcccctgccatcttgccttaggaacagccttcccccaccagcagccatggctggctggggcgttagccaagccacctactgccaggaattggagcctcagttccctcctgtgtcaagtagctaactgcagcagctggactgagggcagagtctgtgggtgcagagaccctgcatgtaggtcacaggttgaggcccagccactctccctggggcctggtgggtaggcaagtagctctggggccacctcaagtgaccaaatgctattaatttccatcctttagcaggctgggccctaggcaggaagctggcttctgggagaggagtgagaacgtgcagggcctgcctagcttgcgtgcttgaggaaggtggcattccgtgcttgcctccttgaggagggtggcattctgtgtcttctgcttatgaagcgcctttcttaaagtttggcaataaatccatttttatgg

SEQ ID NO: 548 - DNA, 640 bp, Homo sapiens
cggacgcgtggggatgaaggtgacttggaatatgctgtacagatggcattaaatgaatatggatctccttttggaaacttttcatctgcatgatttgtaccctgttgaaatgtaaaacgactaatttaaacacttgcggtgactcagctgaaacagcttctaccaggtttgaaatgttctccctcagtggcactttcggaacccagtatgtctttcctgaggtgttgctgagtgaaaatcagcttgcacctggagaatttcaggtgtcaactgacggacgcttgtttagtctgaagccaacatccggacctgtcttaacagtaactctgtttgggaggttgtatgagaaggactgggcatcaaatgcttcatcaggcctcacagcacaagcaagaataataatgctaatagttatagcacctattgtatgctcattaagttggtagaatattgactttttctcttttttatttgggataatttaaaaaatgatggatgagaaaagaaagattggtccgggttaatattatcctctagtataagtgaattactagtttctctttatttagacaaacacacacacaccagataatataaacttaataaattatctgttaatgtagattttatttaaaaaact

SEQ ID NO: 549 - DNA, 591 bp, Homo sapiens
gaggtgttgcagtaatcatgtcctgggtggtcctctgcacaggtgcagtagctgttaatgcttgttcatacaccacatgtctcagtagcatcttaaatttccacctagaggtgtgttttttattattatcatgtgcaaagtatcagtttgaggacaggtaaaatcaaaatgtgtatgctctctagaagggaaagtccctactgaagatagctttgcttaaatgagctcaattacaatgtgaatgctgaggtttattgtgttggctgtatggtcatgagaaaatggtcatttccttgactacctgatacggtttggctgtgtccccacccaagtcttattttgaattgtaatccccataattcccacatgttgaaggagggacttggtggtaggtgactggatcatgggggtggtatcccccatgctgttctcatgattgtgagttctcatgagatccaatggttttatacatggtagtctctcctgctgccatgtaaaacatgcctgcttccccttctgccaggattgtaagtttcccgaggcctgcccagccatgtggagctatgagtcaattaaacctctttcctttat

SEQ ID NO: 550 - DNA, 998 bp, Homo sapiens
gcgcacggggttttggccaaattgggcgagggcacaaaataaccacttaccccttctcaccgaggaagagcgggagaaagggtatggcacagtcacaagggtgggtgaaaagatacatcaaggccttttgtaaaggcttctttgtggcggtgcctgtggcagtgactttcttggatcgggtcgcctcgtgtggcaagagtagaaggagcatcgatgcagccttctttgaatcctggggggagccagtcatctgatgtggtgcttttgaaccactggaaagtgaggaattttgaagtacaccgtggtgacattgtatcattggtgtctcctaaaaacccagaacagaagatcattaagagagtgattgctcttgaaggagatattgtcagaaccataggacacaaaaaccggtatgtcaaagtcccccgtggtcacatctgggttgaaggtgatcatcatggacacagttttgacagtaattcttttgggccggtttccctaggacttctgcatgcccatgccacacatatcctgtggcccccagagcgctggcagaaattggaatctgttcttcctccagagcgcttaccagtacagagagaagaggaatgactgcatgaatctacctgagttgctggcattgggaggccagttactggaaaggaatggaaaaaagaagcctccaaaagggaaaaacttctgacaatatgatgctgtgcgagaaatatttacagcacattaaaacgatctgtattattaaataaataattttcaaatgttaaacagtattaaatggcacctgattttgtggtaaattttagttccctgttgtttaatgcccccaaaatatgcagacctttgggaatataaaaatattgcacccacatgtcttaatggggctgaatttcagattatttgttacatatacttattatattgattgttgggttttgattttggtgcttgctgctgaaataaattgaaaattaatattcaat

SEQ ID NO: 551 - DNA, 837 bp, Homo sapiens
ggcaggtaaacattacagtacagaagaaagtgagtcagtggtgggagagactcacaaagcaggaaaagcgaccactgtttttggctcctgactttgatcgttggctggatgaatctgatgcggaaatggagctcagagctaaggaagaagagcgcctaaataaactccgactggaaagcgaaggctctcctgaaactcttacaaacttaaggaaaggatacctgtttatgtataatcttgtgcaattcttggggatctcctggatctttgtcaacctgactgtgcgattctgtatcttggggaaagagtccttttatgacacattccatactgtggctgacatgatgtatttctgccagatgctggcagttgtggaaactatcaatgcagcaattggagtcactacgtcaccggtgctgccttctctgatccagcttcttggaagaaattttattttgtttatcatctttggcaccatggaagaaatgcagaacaaggctgtggtttctttgtgttttattgtggagtgcaattgaaattttcaggtactctttctacatgctgacgtgcattgacatggatgggaaggtgctcacatggctccgttacactctgtggatccccttatatccactgggatgttggcggaggctgtctcagtgattcagtccattccaatattcaatgagaccggacgattcagtttcacattgccatatccagtgaaaatcaaagttagattttccttttttcttcagatttatcttataatgatatttttaggtttatacataaattttcgtcacctttataaacagcgcagacggcgctatggac

SEQ ID NO: 552 - DNA, 1957 bp, Homo sapiens
ttttttcagaatgaacttaataattacctgttggtttgttgttaattatcctccctcccttcttttgtgatgatatattggtacaagtagacagatttacatttctggaagcagtctctgagtttacgccccaaggtaaaattaatctggccaggtctttgtttttcacctgcatcagtttcatacatcatcatatttctgattagtaagaagaggcagccagaagtgagatacagattttcattaggtgaggtagaatgaacatggcagaaaataggataggacaacatatctttttatttaaatacataggtaacaaagaaaatatcaaattattcatacctggtaaaaggtaatatgtaatgtgtcttgttttaaagcttgttaagggtaaaaaatacaggtaatatgttactcttgctctcaaacttattttgacaggttgacaccaaaggagtggtaaaacgttcttctccaaaacattgtcaggctgtcttaaaacagctgaacgaacagagactttccaaccagttctgtgatgttactttgttaattgaaggagaagagtacaaagctcataaatctgttttgtcagcaaatagcgagtattttcgagatctttttattgagaaaggagctgtttccagtcatgaggctgtggtggatctttctggtaagggttttgtattactcttgctttttgtttgtaatgacattctagaagagggggatatgtatgtcttccacacacggactttatgccaaagtaagagaagcccactgacaacagtagactaagctgtactgaaaaggttctttttagcaagatttctgtggtagagttatggaaaagggtgtcatttcctttcactacgtcttaagtgagacaattatagcagaaaaagaatttctaggatttaaactgttaaaaacagtttgagtgaaatccataagtgcaccaaaattattacattaaatgaatatgttatttaaaaattgattgtttaagctaggtgtggtggtgcccgcctgtagtcccacctacttgggaggctgggatgtgaggatctgcttaaggtcaggagttccaggctgtggtgtgtcattgtacctgtgaatacccactgctctccagacggggcaatataacaagaccctgcctctaaaaataaaaagcaaataaaaattgactgtttatgtcttattttgtgggacatgtaattatagagtattttataagtcttttggtttttaaagattaatccttagagtttattaagttcaataatcaaattatcaatatagaaaagtcaaaatcccaggtttgttttttgtttgtatcattattgtaaataaatagttcaactttcttttggcttcactagaatttatatattggcttatgagtcatcaaatgaaaatttaggaagaattataggtagcattatttatacgttttctcatcatataaaacttgctgtaacttttgaattacttaaatcactttgaaatattttttcctttttgaaacaaaaaagtgacttttccaggtatgtaaattcttaattatttaaccacttatccttttatgctttattgtttttagtcctacctcttctgggaagatacatttttccttagcagtggctttatgtttatagaaagcaataataacggccaggcgcagtggctcctgcctgtaatcccagctttttgggaggctgaggcaggcggatcacctgaggtcttgggtttgagaccagcctgatcaacatggagaaaccctgtctctactaaaaatgcaaaattagttgggcacggtggcgcatgcctgtgatcccagctactcgggaggctgaggcaggagaatcgcttgaacctgggaggtggacgttgcggtgagctgagatcacaccattgcactccagcctgggtgacaagagcaaaactccgtctc

SEQ ID NO: 553 - DNA, 1080 bp, Homo sapiens
  misc_feature 134,135: n = a,c,t, or g
ggacatttaggttggctccgcgccttgattgttgaaaacaatgctgcagtgaacatgggagtgtgactgtttcttcgaggccctgcttttaattattttagataaatacccagaagtaggattgctggatcatnnattgttctgtttttaattctttgaagaccttcatactgttttccatagtgactagaccattttacattcccaccaacaatgtacaagggttccagtttctccacatcctctccaacacttgtaatgttttgttttttcataatggcatcttaaaaggtattaggtgatattactatctcatggttttgatttgcatagcctagaacatttttgagtcttcctgtgtcctacccaggttattcatttccagctactgctcttcctttgctcatagcacacaacaccagttgttaggtcctggaggaagtaaaaatatgtgtaactatggtccctggctatatgaatcaggatgctctggacaagaattaaattatgaggaaaatttattttatttcataacattagtacgtgagtaggtaagcccaggagtttggtgattcagcaactctgagacctcttaaggggcctgaattctttccatctttcttccttgccattctaattaggtcagctgtgctctcagactgcctgccttcctgctgctgcagtttcaggcatcacacccagagataacattcataaaagaacaggagcatctcttctgtgttttcttctaaggaatgaaggaaccatttcccagaagtccttcaagaatcctcttctaggccgggcacagcggctcacacctataatctcaacactttgggaggccaaggttgggggattgtttgagtccaggagtttaagaccagcctggaacatagcaagaccctgtctctacaaaaaatataaaaaatgagcggggcatggtggctctcgcctgtggttccacctactagggaggctgaggcaggaggatcacttgagcccaggaatttgaggctgcagtgagctacgatcacaccactgcattctagccttaagtgacagagtgagaccccaaat

SEQ ID NO: 554 - DNA, 1004 bp, Homo sapiens
ggtcatgccttcagtgtcttgttctttaaacctaccctttgacaatcaggtgctaatgattgtatactattaaaaccagcacataagtattgtaaatgtgtgttcctcctaggttggaagaaatgtctttccttctatctgggtcctgttaaagcgggtgtcagttgtgtcttttcacctcgatttgtgaattaatagaattggggggagaggaaatgatgatgtcaattaagtttcaggtttggcatgatcatcattctcgatgatattctcactttgtcgcaaatctgcccttatcgtaagaacaagtttcagaattttccctccactatacgactccagtattatgtttacaatccattggatgagtgcagcattataagaccttggtgcccagaaaaatctgtcctttttggtaccaaacctgaggtcttttggaagataatgtagaaaaccactacctattgaaggcctgttttggctaatctgtgcaaactctgatgatacctgcttatgtggattcttttccacactgctttcatttttaagtataaagacttagaaaactagaataatgcttttacaaataattaaaagtatgtgatgttctgggttttttccttctttttagaaccctgtatttaaacaagccttctttttaagtcttgtttgaaatttaagtctcagatcttctggataccaaatcaaaaacccaacgcgtaaaacagggcagtatttgtgttcctaattttaaaaagctttatgtatactctataaatatagatgcataaacaacacttccccttgagtagcacatcaaggggaagtgttgtttatgcatctatatttatagagtatacataaacaacacttccccttgagtagcacatcaacatacagcattgtacattacaatgaaaatgtgtaacttaagggtattatatatataaatacatatatacctttgtaacctttatactgtaaataaaaaagttgctttagtc

SEQ ID NO: 555 - DNA, 2054 bp, Homo sapiens
agggtttgagaacttggcctggggtcttcttggtgaatgtggtttcttcctttagttatgggtgggaaaacgtttccatcataagacaaggcttgtttcccgcctctgacttcctagggcaaggctgatctcctctctaattctcagggcagggttctgtccccatccccctccatgttcccagaggctgggcatggagggctgcctatcaagcccccatatctatatccctgctgtgcctccctttcccccacccccagtgccccagcaagacctttggcaccttcagttccaccaaggacttcccagacgatgtcatccagtttgcgcggaaccaccccctcatgtacaactctgtcctgcccactggggggcgccctcttttcctacaagttggagccaattacaccttcactcaaattgccgcggaccgggttgcagccgctgacggacactatgacgtcctcttcattggcacagacgttggcacggtgctgaaggtgatctcggtccccaagggcagtaggcccagcgcagaggggctgctcctggaggagctgcacgtgtttgaggactcggccgctgtcaccagcatgcaaatttcttccaagagggtgagtgaccaggatgggggtcggggtgggatggactgagcttgtgcctggcgcgtcccaagcctctggccccttttggtagtttgcagtcccgggtttgagtacaggctctggctttgttagactgtgtgacctgaggcgtaagacctcagtgttcccatctgtcgagtggaagaagggatccctgaccgatgggaggcaggcgtggggtcgccctcggtcagcccaaagcccctcgtgccccctagcaccaactgtacgtaacctcgcggagcgcggtggcccagatcgcgttgcaccgctgcgctgccacggccgcgtctgcaccgaatgctgtctggcgcgtgacccctactgcgcctgggacggggtcgcgtgcacgcgcttccagcccagtgccaagaggcggttccggcggcaagacgtaaggaatggcgaccccagcacgttgtgctccggagactcgtctcgtcccgcgctgctggaacacaaggtgttcggcgtggagggcagcagcgcctttctggagtgtgagccccgctcgctgcaggcgcgcgtggagtggactttccagcgcgcaggggtgacagcccacacccaggtgctggcagaggagcgcaccgagcgcaccgcccggggactactgctgcgcaggctgcggcgccgggactcgggcgtgtacttgtgcgccgccgtcgagcagggctttacgcaaccgctgcgtcgcctgtcgctgcacgtgttgagtgctacgcaggccgaacgactggcgcgggccgaggaggctgcgcccgccgcgccgccgggccccaaactctggtaccgggactttctgcagctggtggagccgggcggaggtggcagcgcgaactccctgcgcatgtgccgcccgcagcctgcgctgcagtcactgcccctggagtcgcggagaaagggccgtaaccggaggacccacgcccctgagcctcgcgctgagcgggggccgcgcagcgcaacgcactggtgaccagactgtccccacgccgggaaccaagcaggagacgacaggcgagagaggagccagacagaccctgaaaagaaggacgggttggggccgggcacattgggggtcaccggccgatggagacaccaaccgacaggccctggctgagggcagctgcgcgggcttatttattaacaggataacccttgaatgtagcagccccgggagggcggcacaggtcgggcgcaggattcagccggagggaagggacggggaagccgagctccagagcaacgaccagggccgaggaggtgcctggagtgcccaccctgggagacagaccccacctccttgggtagtgagcagtgagcagaaagctgtgaacaggctgggctgctggaggtggggcgaggcaggccgactgtactaaagtaacgcaataaacgcattatcagccc

SEQ ID NO: 556 - DNA, 744 bp, Homo sapiens
gtctccatgagggttttcctgttgaggggcaccacatacaatagtgtgaagtaggtatgaggggcagtcattgtattctatagtttttttatgtagtctacatttctcagatgtatccccattcggttttattctcagaactgttactagactcatgacttggaggccaaaccttaaatccagagatagcagcctcgatagggaccttaaaaggattcacaaaaacttttgccacacttggtgcctaggccctgttcctaataaccccttctagggccgtttatccaacatttagatgccttcttttccctccctaatttgtagccagtccaacctttcattccttggaggatttagttttgggataaaattttggtccttgggcacagagacattcactattaatgaagtaacccttgggcatgactccaatcccagaattgctcactgagcgctatgccaccgaagcgttgacctgaacatattagtgcaatccagtccagattggacctttgatcctatgtggaagggctgttttttaagaaaaaatttttggtaaacagtattgtgtaaaattgctttttgtataccaatatatgcatgttttgtgcatgagtagtacttgtgttgatactcctgttgatgttaaattactatataatataaacagtatgtgtttttatatatcattgtgtaaatttaatataacatatgcagtaataaaccatttgttttactgctaag

SEQ ID NO: 557 - DNA, 549 bp, Homo sapiens
cttttttttttttttttttttttttttttttatgagaatcatacagtggctttattcttactacttaaaaaaaggtgatgtgatggcagtgatggtcaacatcacacagggaagaccaggtccacgctttgtccagaatcaactgctaccacatgagtcttcttggttaagtcatttgagcccacagtgacagaataggtccctggatatacttctatgtagaggtccttagagatgttctcagcctgaccattccctatgtccaagcacatgtgcagcttcgactcgcctctgtgataacgatagacatgggttgcccctccttcctctggcacagatgaataatatttctctcccgggagaacgcgctgcgggccggctgccggctgtttctctaggtggggcgcctcccgggcaaggacccccatgcagcctttgggacgctccagggcatgccagtccaccgccctcctcttggccctctccagcacttctagagccagccttgctgaacgctgcagggaacgtcggtccaccccattcagcgct

SEQ ID NO: 558 - DNA, 855 bp, Homo sapiens
cttttttttttttttttttttttttttaagacagttttgctctgtcgcccaggctggagcgcagtggcacgatcttggctcactgcaagctccacctcccgggttcacgccattctcccgcctcagcctcccgagtacctgggactacaggctcccgccaccacacccagctaattttttgtatttttagtagagacggggtttcaccgtgttagccaggatggtctcgatctcctgacctcatgatctgcccgcctcggcctcccgaagtgctgggattacaggcgtgagccaccgtgcccggcctgatgtttttgaatgattatgaaaatgggtatacagcattaaaaccttagactgattttaaatatattaatttcttttaaactcaatataatgttaatattactgtagcacttactagcatttctgaaggttggtcttgagataagattgaaaatgacagttgttgattttctgaggtaatatacccaaataaaatatatgtatgtgtacatgaatctaaactgtcttcttctgttcctaattttgctttacttaaataatctttcatattttttaagtgttttgcccatgtgcttgggtagccttgaagtcaccagaataactaggactcaaattcagaccaaaccaggactagctttttgtgccatgagttagccatggtcctggacccagcaaaaagaatgattatgatggtcagagtaagatgagcaattgcaacataatattctctaatattgtatactgtaaatttattcagctgccctcgtttactcacagtttgcttatttgccaccataagaaatggtacaataaaaattcatgtaatcg

SEQ ID NO: 559 - DNA, 504 bp, Homo sapiens
gcggcggggcctgcacgttgactgtgggaaactcggaaacaagctcacatcttcctgtgggaaaccttctagcaacaggatgagtctgcagctggcttccacctggcacgtgcctgctgcttcctgagagcccggcctctccctccagtacttctgtttgtgcccttctgcttcccccattcccttccacagctcatagctcgtcatctcggcccttgtccacactctccaagcacattacaggggacctgattgctacacgttcagaatgcgtttgctgtcatcctgcttggcctggccaggcctggcacagccttggcttccacgcctgagcgtggagagcacgagttagttgtagtccggcttgcggtggggctgacttcctgttggtttgagcccctttttgttttgccctctgggtgttttctttggtcccgcaggagggtgggtggagcaggtggactggagtttctcttgagggcaataaaagttgtcatggtgtgt

SEQ ID NO: 560 - DNA, 1236 bp, Homo sapiens
  misc_feature 175,880: n = a,c,t, or g
cttgtgtgtgtgcatggtgtcagcccaaagccaggctgagacagtcctcatatcctcttgagccaaactgtttgggtctcgttgcttcatggtatggtctggatttgtgggaatggctttgcgtgagaaaggggaggagagtggttgctgccctcagccggcttgaggacagagnctgtccctctcatgacaactcagtgttgaagcccagtgtcctcagcttcatgtccagtggatggcagaagttcatggggtagtggcctctcaaaggctgggcgcatcccaagacagccagcaggttgtctctggaaacgaccagagttaagctctcggcttctctgctgagggtgcaccctttcctctagatggtagttgtcacgttatctttgaaaactcttggactgctcctgaggaggccctcttttccagtaggaagttagatgggggttctcagaagtggctgattggaaggggacaagcttcgtttcaggggtctgccgttccatcctggttcagagaaggccgagcgtggctttctctagccttgtcactgtctccctgcctgtcaatcaccacctttcctccagaggaggaaaattatctcccctgcaaagcccggttctacacagatttcacaaattgtgctaagaaccgtccgtgttctcagaaagcccagtgtttttgcaaagaatgaaaagggaccccatatgtagcaaaaatcagggctgggggagagccgggttcattccctgtcctcattggtcgtccctatgaattgtacgtttcagagaaattttttttcctatgtgcaacacgaagcttccagaaccataaaatatcccgtcgataaggaaagaaaatgtcgttgttgttgtttttntggaaactgcttgaaatcttgctgtactatagagctcagaaggacacagcccgtcctcccctgcctgcctgattccatggctgttgtgctgattccaatgctttcacgttggttcctggcgtgggaactgctctcctttgcagccccatttcccaagctctgttcaagttaaacttatgtaagctttccgtggcatgcggggcgcgcacccacgtccccgctgcgtaagactctgtatttggatgccaatccacaggcctgaagaaactgcttgttgtgtatcagtaatcattagtggcaatgatgacattctgaaaagctgcaatacttatacaataaattttacaattctttgg

SEQ ID NO: 561 - DNA, 565 bp, Homo sapiens
  misc_feature 512: n = a,c,t, or g
tctgtcctcattccctgcccttcctttggttgccatatggaatggccatggaatgcacgaagtcacaatgcaccatccatgagaagacagtgaaatgatgtaatgacagagaaggcagacaacatgtttccgtgactcatctagtcagagcaattatgggaaacagctttggtcaacattctactttggaaagaattttgagtctagatgtggttaaattttgacttctgggaacttggttcagatgtccctttcactgtatgtcctctgacccctttggcaaggttgccacagctcccacagcccttcctacaagcacctatcattgggcttgtcacactctattgctcttctgtcccgaagatgcagtcttctctccaatgatactaccaagtcttagttttcctcaaccacactcaatctttttgctccaccctgaattcctcacacctaaccctgatagttacctaaagtgacacttaaatgtttcagagtgaatgcaaaaaagagtngatgtacttggagtcggatatacaatttatccctaattaaagcatttaaaagg

SEQ ID NO: 562 - DNA, 581 bp, Homo sapiens
cccacgcgtccggccgcaacctgcacagccatgcccgggcaagaactcaggacggtgaatggctctcagatgctcctggtgttgctggtgctctcgtggctgccgcatgggggcgccctgtctctggccgaggcgagccgcgcaagtttcccgggaccctcagagttgcactccgaagactccagattccgagagttgcggaaacgctacgaggacctgctaaccaggctgcgggccaaccagagctgggaagattcgaacaccgacctcgtcccggcccctgcagtccggatactcacgccagaagtgcggctgggatccggcggccacctgcacctgcgtatctctcgggccgcccttcccgaggggctccccgaggcctcccgccttcaccgggctctgttccggctgtccccgacggcgtcaaggtcgtgggacgtgacacgaccgctgcggcgtcagctcagccttgcaagaccccaggcgcccgcgctgcacctgcgactgtcgccgccgccgtcgcagtcggaccaactgctggcagaatcttcgtccgcacggccccagctggagttgcactt

SEQ ID NO: 563 - DNA, 1007 bp, Homo sapiens
gaagcggatcccgtccgagccccggccccaagtaacgccgccgccccggagccgccttggaggtccccctccccactaagtgcctctttgcatagcaccagtccccacccgcacgctctctggaccactacagctggacgggcaatggcgggtcggggaggcgcagcacgacccaatggaccagctgctgggaacaagatctgtcaatttaagctggttctgctgggggagtctgcggtaggcaaatccagcctcgtcctccgctttgtcaagggacagtttcacgagtaccaggagagcacaattggagcggccttcctcacacagactgtctgcctggatgacacaacagtcaagtttgagatctgggacacagctggacaggagcggtatcacagcctggcccccatgtactatcggggggcccaggctgccatcgtggtctatgacatcaccaacacagatacatttgcacgggccaagaactgggtgaaggagctacagaggcaggccagccccaacatcgtcattgcactcgcgggtaacaaggcagacctggccagcaagagagccgtggaattccaggaagcacaagcctatgcagacgacaacagtttgctgttcatggagacatcagcaaagactgcaatgaacgtgaacgaaatcttcatggcaatagctaagaagcttcccaagaacgagccccagaatgcaactggtgctccaggccgaaaccgaggtgtggacctccaggagaacaacccagccagccggagccagtgctgcagcaactgagccccccttgcctgcccgctgcccccgcctcctccgcctgaatgacccgactggaatccactctaaccaatcgcacttaacgactcgggccaccactgggggggcagggggaggggtccaccatgatttctccatataattttgatcataggccggagtgagtcattccacctgcacctttctgtacaaatactaattcaattttaagtctt

SEQ ID NO: 564 - DNA, 946 bp, Homo sapiens
  misc_feature 942: n = a,c,t, or g
gccaacctcctactcctcattgtacccattctaatcgcaatggcattcctaatgcttaccgaacgaaaaattctaggctatatacaactacgcaaaggccccaacgttgtaggcccctacgggctactacaacccttcgctgacgccataaaactcttcaccaaagagcccctaaaacccgccacatctaccatcaccctctacatcaccgccccgaccttagctctcaccatcgctcttctactatgaacccccctccccatacccaaccccctggtcaacctcaacctaggcctcctatttattctagccacctctagcctagccgtttactcaatcctctgatcagggtgagcatcaaactcaaactacgccctgatcggcgcactgcgagcagtagcccaaacaatctcatatgaagtcaccctagccatcattctactatcaacattactaataagtggctcctttaacctctccacccttatcacaacacaagaacacctctgattactcctgccatcatgacccttggccataatatgatttatctccacactagcagagaccaaccgaacccccttcgaccttgccgaaggggagtccgaactagtctcaggcttcaacatcgaatacgccgcaggccccttcgccctattcttcatagccgaatacacaaacattattataataaacaccctcaccactacaatcttcctaggaacaacatatgacgcactctcccctgaactctacacaacatattttgtcaccaagaccctacttctaacctccctgttcttatgaattcgaacagcatacccccgattccgctacgaccaactcatacacctcctatgaaaaaacttcctaccactcaccctagcattacttatatgatatgtctccatacccattacaatctccagcattccccctcaancct

SEQ ID NO: 565 - DNA, 426 bp, Homo sapiens
gattacagcagctcacgtgacggatatggtggaagtcgagacagttactcaagcagccgaagtgatctctactcaagtggtcgtgatcgggttggcagacaagaaagagggcttcccccttctatggaaagggggtaccctcctccacgtgattcctacagcagttcaagccgcggagcaccaagaggtggtggccgtggaggaagccgatctgatagagggggaggcagaagcagatactagaaacaaacaaaactttggaccaaaatcccagttcaaagaaacaaaaagtggaaactattctatcataactacccaaggactactaaaaggaaaaattgtgttactttttttaaattccctgttaagttcccctccataatttttatgttcttgtgaggaaaaaagtaaaacatgtttaatttt

SEQ ID NO: 566 - DNA, 332 bp, Homo sapiens
tgacgacctacgcacacgagaacatgcctctcgcaaaggatctccttcatccctctccagaagaggagaagaggaaacacaagaagaaacgcctggtgcagagccccaattcctacttcatggatgtgaaatgcccaggatgctataaaatcaccacggtctttagccatgcacaaacggtagttttgtgtgttggctgctccactgtcctctgccagcctacaggaggaaaagcaaggcttacagaaggatgttccttcaggaggaagcagcactaaaagcactctgagtcaagatgagtgggaaaccatctcaataaacacattttggat

SEQ ID NO: 567 - DNA, 870 bp, Homo sapiens
gtagacagccggggccttcgtgagaccggtgcaggcctggggtagtctcctgtctggacagagaagagaaaaatgcaggacactggctcagtagtgcctttgcattggtttggctttggctacgcagcactggttgcttctggtgggatcattggctatgtaaaagcaggcagcgtgccgtccctggctgcagggctgctctttggcagtctagccggcctgggtgcttaccagctgtctcaggatccaaggaacgtttgggttttcctagctacatctggtaccttggctggcattatgggaatgaggttctaccactctggaaaattcatgcctgcaggtttaattgcaggtgccagtttgctgatggtcgccaaagttggagttagtatgttcaacagaccccattagcagaagtcatgttccagcttagactgatgaagaattaaaaatctgcatcttccactattttcaatatattaagagaaataagtgcagcatttttgcatctgacattttacctaaaaaaaaagacaccaaacttggcagagaggtggaaaatcagtcatgattacaaacctacagaggtggcgagtatgtaacacaagagcttaataagaccctcatagagcttgattcttgtatattgatgttgtcttttctttctgtatctgtaggtaaatctcaagggtaaaatgttaggtgtcagctttcagggctctgaaaccctattccctgctctgaggaacagtgtgaaaaaaagtcttttaggagatttacaatatctgttcttttgctcatcttagaccacagactgactttgaaattatgttaagtgaaatatcaatgaaaataaagtttactataaat

SEQ ID NO: 568 - DNA, 586 bp, Homo sapiens
  misc_feature 15,18: n = a,c,t, or g
gtgttttagccttgnggnttgtaaaagaacagtaacagtctaaaggtactttttgattgaagataggcagtagaaatacctaaaatatttgtagaaaacataaaactggacttcagtgctaactagtgaatctggacagggatgttttccattccatctggcataaccccttcctgagcccatggacatatctgaagccttcctcctcacagttcagcccaggccttccatgaacacatttgcttgttcacatctgtctttgtctaactcttatagcatttcctgcttctgtcattttctgttggatacttaaccttttattaggctgttggtgtgtattattctttacagctagatcttaacccattggatagacatcatattttgtatttttcacaccgatcagtttttagctgaaagctattatatataggaggcccttaaaatatatgttaaatgaataagtatttcacaacccgtttttgaatatttccctctctaggtttgaacttggctcatcttccatagcccacatggtaatgggtacaacaaatcaattctccacaagaacacggcttgaagaggt

SEQ ID NO: 569 - DNA, 822 bp, Homo sapiens
agctcctgcacccccaggtcctgcagctgcttgttaagctttttgagactgagcactcccagctggacgtgatggagcagcttgagttgaagaagacactgctggacaggatggttcacctgctgagtcgaggttatgtacttcctgttgtcagttacatccgaaagtgtctggagaagctggacactgacatttcactcattcgctattttgtcactgaggtgctggacgtcattgctcctccttatacctctgacttcgtgcaacttttcctccccatcctggagaatgacagcatcgcaggtaccatcaaaacggaaggcgagcatgaccctgtgacggagtttatagctcactgcaaatctaacttcatcatggtgaactaatttagagcatcctccagagctgaagcagaacattccagaacccgttgtggaaaaaccctttcaagaagctgttttaagaggctctggcagcgtcttgaaaatgggcaccgctgggaggaggtggatgacttctttacaaaggaaaatggtagcagcttcagtgagaaactgcccttacaaacagtcccttctctgctgtcaatccaatactgctcccaaatcctgttttcagtgttcatttccctcaaggcaggcgctgggctcccacgacccctcaggacagatctggccgtcagccgcgggccgctgggaactccactcggggaactcctttccaagctgacctcagttttctcacaagaacccagttagctgatgttttattgtaattgtcttaatttgctaagaacaagtaataagtaaatttttaaaaagc

SEQ ID NO: 570 - DNA, 1505 bp, Homo sapiens
  misc_feature 1450,1500: n = a,c,t, or g
gacaagcttggtctgtaagaacacgtgggcaggtgtgtgggtgtctcagaccctcgagctcatcccagaccctgtcccatgtcagttagcaagccaccaaagtccataagggatcctgtggggtggaaggtccgcggggcctgcttccctgttgctggtgcaggcggagtgtctgaaggctgcacgcatctgggcatagcagtgcgcctaacgcttcttgtaaaacagacatttcgcctgctaggccttttaaatgcctctctgtttcttgaaatatgccgtaaagggcaatggaaatgtgctttttatatactcctgttttttctctcgtgagtgtgcaatcgggggacagtgttgagttgctggggtggcgtttttctgctcgtttcctggccccttcttccttcccttcaaccctatcaggggcttactaagaaaaaaaaaaaaacatccaagcgtgttgcaggcagatgagcagtcgcgggaatggctttccgggtgacatctgccagtttggtccccatggcgctcatcccgcgggctcggaccccagcctctcttacatcttccccttgtatgggaaggggtcgcagcagcccacagcttcggcccggcttccgggcttggggaatcttctccgtatcgtagctcttggctcctccatataagacataggaacatgcctggaggcaaagctcctttctaggagagatgcccctctcttacttacataatattgctgggaaattatatgtgaattgcatttttaaaagcggactcatttaaaatgtttcaaaagaggcttgctagtcaagggactgctggcatgaatcattatggaaaacaaattaataaccttctgtcttcagaataaatattttgggagaaagcttggtagcagagtagaaagaaggcagcctttggccacagagccagctaagggttcaaatctcacacccgctgcttgcctcggctgcccctaaatgtgggtactccatgtttcacgagaccaaaaatgcaggtgggagtcactggtgcttgggggtttctgccttctctgccagtgttggggagtggggggccctattctccatgtcagccttgccatgagtaaaaacaggaggaaaaaaagagctggggacagaacgtccttcttctgttgcctccagcggcttcagagcagactttcctggaactccggtttcctgagcgcttgtccttgactcagtttccccagcccaagccccgccacatccatcgtagctagctcctcttagtgccgttcctgtagctagtggtcacccgccgttctgtattgtcactgccctttcctcggtgaccatatgtctgagggtttccatagaaaatcttagaggtttggctgggcgcagtgctcacgcctgtgatttcaacactttggaaggctgaggcaagcaatcacttgaggtcnggagttcaagaccagcctgggcaacataacaagactcatctctgttatanaaggt

SEQ ID NO: 571 - DNA, 1010 bp, Homo sapiens
  misc_feature 943,945: n = a,c,t, or g
cagagaacaagatgtgtcttatgagtcttctttctcaatacctgccctgtctcaaatctcacttgacaaatggtctacgatcttgcagttatccaaaagagcctatgaaaaatggacagctgcttttgacaataatgcccctcccaacttcccattcatagaatcataaagcgatatgtttcagaactgagagagaaaagtttaccttttattccaaatgcctcgtactcggtttaagtccagactcaggtcataaatcaaagacagttttgcacgttgctcttcacctaaatctagcagtttccctgaggccctatgagggcatggacagaaaatgaaggatgcaaccacccaggacagctccctggtttgggctggcctggccacgtgtggtcacatgtcctgggatctgtgtttactgtgtccttgctctccttccttgcagaagctgctaagctctgctcctcctaactgcaggtctcaaaccctattgggtcattttgccacactatttctccaaaggcccatagtcattacattttttaccatttcaccaagataacagggggggtctggaattcccctgctaggaagggccccttttcctatatcaccgtgatggtacagatgaactgagatgaaacttttagacttcagcacgtcacacatcctggttgtataaccaggaggtctgcagagctgcaacccctgaagaacatctgtcttaaaagacctcaaatcagaacattctcattggcctcttcagtgatccccatggagctaagagtccgtaacctaaaggccttaccatagccatcttccctccacacctgattgctcaactgccccagaaggggagaatctatctgaaatagaaaagaagcattaaggaccaggtgcggtggctcacacctataatcccagcactttgggaggccaaggnangtggatcacttaagatcaggagttcaagaccagcctggccaacgtggtgaaaccccatctctact

SEQ ID NO: 572 - DNA, 673 bp, Homo sapiens
cccaggcgcctctagacctcagcctcagcctcagcctcagcctcagccccgatgtcagcactgaggcctcaccccccagagcttcccaggacattccttgcttggacagcagtgcccctgagagtggcacacctatgggtgccctgggcgactggcctgcccctattgaggagcgtgagagcccggcagcccagcccctgctggaacaccagtactgagctacctggcgcccactggaccacctcctaggattcagtaacggacctgctctgctgcctctctgctggaccacagaactgagtggctttggcctacatgtctgaaccctgacctttggctgccttggccagagtaccaaaactgagtgacccagacctctgaccttgacccctgatctctctcatccccagtccagggcctgggctccccagatggaggcagtcagcctcccagccaggccctaagagccaaaccatgggctggtcccacttggagcctgtggccaggaccacctcagcccctgggcctgcactgcctgcaggtgtggcccccttggcctggacctggggcctgaattgtgggaagggtggtttctttctttccttttttttcttttctcttttttttttttttttgtgcttcggagacatcagaattaataacactatttttg

SEQ ID NO: 573 - DNA, 649 bp, Homo sapiens
tttaatttgtgcagaatgataaagaatgttccttttagaagtgtgttatgtctgtacctgtctgaagagtgacattaaactttgaaaggacttcactgctcctttacgatattccaaatagttttttacattggaaaaactaattcttgggattctttcatacattttcatcaaaactttcagtgtgattatgtattcatatcttcagtttaatatgtcagtataatagatattgttcaaaagtttcttgttgctaaagtggtgtaatctgttacacagatgaatagctagatgtggaaagagatatgtaaacaagaaacctttgggtattgtttcttaagtaaaattgggacaatcatggtaagcaaacttagttctgtaactgcatttttcaccttaaaagttaaatgaaatgcatgatggtattttattccttgaattatgcaatgcaacattttacatgtaaatagcactggtcatatactgatgtatatggttatctgggttatatctatttttatgtaaactctattttgtttttggcaagaagtgaaattgagacttatgtgcaggttgccattgaattttgctctggtgaatgctgagatccagctttttcttacaaataaatgggaccctgttttccaat

SEQ ID NO: 574 - DNA, 840 bp, Homo sapiens
aatctgtagtcctacaaaactcaggcatagaactcatttcctttatggctctataatggaactttacccaactctcacgttccccatgaccacagatgtggaaaatttgaatcttgacagttcaaggtgaactcagtcattttcagagttttcatagtcccttcaagattgaaactcagttcctgcaatgtttgccccttttctcctcttttgtctatgctgggagaggcattgtggggagggttgtctggcttatggctcccattgtcctctgcttgataaaccacctgagctttggtcattagcagtctcctgtgcctttcacactcaggtagtgtctgcacaggccactctatgtctttccatgctgaagaaattcctttccaggccatgtctgtgttcctcctgccacacaggaaatttttgagcatgttcatcctccaagctgaatgcagggtcttgggtagtggtcctcacctgctccagagacttctccagccattgccactctccactcaggtgatgaagctggatgagggactgcacccaccagagtcaggccagggtcctgtctgctctgtgagtccctccaattgttcttattccgagatttccattgttctgccccctcttgactcccagggctctcaagggagtgggggtagtgaagggagccctttcccaagctcccccaagagctctagtcacatcacttctgatacttcttttcccaccagctggaagaaagaactttcatttgtcttgaaatgagaaaaatgttcttagaatattttgtattactctctgctctgtcatttatggtaaacaaaataaaataat

SEQ ID NO: 575 - DNA, 606 bp, Homo sapiens
gggaggtgatcggggcaggagtaaagtggacacctcagcaaagccattcgctgtgatctctgattgtgcagtgtcatgtcctgtcaccagagccccctcgtgtttgatgttggccaatgccgccagcatgatctagcaggccaaatcctaatctaccattctctgacaccagctggtcccctgggtcgtccacccgatgtcccccattctccccacttggcctcccccacaggctctcggcaaaggaccgtgggaggcacctgtgacactgcccttttcctgtgcagctgtttttcttcttcattcttttcactcctcgttactctttttttttttcactctcagcccacacaaaactaggaactttgttattctacttatttttctgtactctgtctgtttgcacacagatggatatctgagagccagcgaactttctttacctcctagtatcatttcatgaaaattagtagcacctgcacaatggggccttggagacaggaataaaaggaaaaatctggaatggaatcacatgacgcaacaggctatgaagactccctgcccggctgctatatgtctggtaaacagaataaatagtacttgagc

SEQ ID NO: 576 - DNA, 352 bp, Homo sapiens
gccacctgccctgcctgggggatcatactcctgtcatagcagttgaagttgcccctcttctgccaaagtctttcctggtatccagttgcaatgagtcatccctttcttctgggtgtccacagtttgttcttctgcttcagttataccattcagctcattcttgtttttctttttattggaattatgtgtggacttctatcttccaaaagcctagaagctgagggctgggtctttgttcatctttgtgtgccccattgcacatggaataatacttggaatacaaggccggcaacaccatacaagctcagtgaatatatttatgtcatgcttcaataaactaatgatattttat

SEQ ID NO: 577 - DNA, 747 bp, Homo sapiens
ctaattgaggattacagaaagaaaaaaagcatttgctttatttttagacgtgatctctgatgtcttcaacttttatcgttctgtttttaaccttagattattataaccagccacctacaaaatctgcaattttctctaataagtcagcacctgttaaaaaggaggttgcacaaaacactcccatttgcagtttggaaggattattatctgctttggtctgtgaagtggaaagtcaatgttcttattcaatctgtgtctaatggtgtcattttgaggacaatggaaaacagatcatgtttgattccttaagatgtggccactgctatttgtggtacaatttgtgatctgagagctgcatgtaaaaaacacatgagcaaaaagaatatccagcacacaagggctggctttctgattctcagaggtatagtgacaacacagcttacctctgcattcaaagaagctagaacttaccgcggataatcattagtagaagacagcttaaagtagtgtctgctttctggctaggcctgattcacaggtgctgtgataaattcaaaaagacctgcctcctctgatgtgctagtatcaagggtgagggagacagttaaccaaactggtcaaaagcattgtcagcaaagacctggtgctgaatcatgttgggaaactggagtttggagctagagaggcaataaccaagtatcaaggtctgaatgtccactttgtaaccactgtagtaataattgactc

SEQ ID NO: 578 - DNA, 791 bp, Homo sapiens
  misc_feature 418,419: n = a,c,t, or g
gggcaccatgccaagcactttcatcattatttatacatcgtcaccacaccccctctattcatgagaagtaaagctgagaaaggaccagattgaccaagcgccagagacaaaatgtggcacaacgagaaccccagccctgtccaggtggctccgcgcccagggcccaggcttagcagtgctccctgccctatctttgggaaaatcttgcttttatggtcttcccccctctcgccctcaagaacaagggccttgtgcgtgggccttcccattgctgctttcccaagaaggcctggattcaggggagaggccttcccagggccactccccttacaccctcccagaggcctgagcaacccctctctgggtggtttggggctggtgctgcctggcggaaggacagtgagggcggccctagccnntccaccctcttgcgcctctgccctctcccagtccccctgtggcttctgaaaatctcagggacagatgaggctgagcccctagtcccctctgtgtgctttgagcctccagactcgaggctggtcactgcaggtcccaggtggaatttggacaactggcctggccgctcccatcctgtaagcccccaccacggggagaccctcatccctgcccctgtgtggctgcgcaagtattctgcccgcctcccaccatcagccttcgcccaaggggcccttctgcctctgcttccctcccttctcctctgtcttgccctggcccacgcacgcctgtctcgtcttccttgttttgctgcactcacttttttatactctgac

SEQ ID NO: 579 - DNA, 764 bp, Homo sapiens
cggacgcgtgggtttcctagacaccccttggccacctttttccacctgtttttccgagtgagtgccatcgtcacctacgtgagctgcgactggttcagcaagagctttgtgggctgttttgtcatggtgctgctcctcctgtccctggacttctggtctgtgaagaatgtaaccggaagactcctggtgggccttcgatggtggaaccagatagatgaagatgggaagagccactggatctttgaagccaggaaggtctctccgaatagcattgctgccacagaagctgaagcacgaatcttctggctgggcctcataatctgccccatgatatggattgtgtttttttttagcaccttattttccttgaagctaaagtggctggctctggtggttgctgggatctctctccaagctgcaaacctgtatggctacatcctttgtaagatgggaggcaacagtgacattggcaaggtcacagccagtttcctgtcccagacagtgttccagacggcctgcccaggtgactttcagaagcctggcctcgaggggctggagattcaccagcattaggaactgatgaggttctcttcttttgactgatggagattacaaaactcttggattcctggaaaacaagacgacaggcatagagtgctaatggcttgtctaccccttgacagccctgtcctgtgctggggagggctgtgttttgacaggggtggaatcctctggctagttccataaaaagacctgtgtctgtg

SEQ ID NO: 580 - DNA, 746 bp, Homo sapiens
ccgtcttccccaaccaggagcaggcccgggagctggcaaagacgctggttggcgtgggagccagcctagggcttcgggtcgcggcagcgctgaccgccatggacaagcccctgggtcgctgcgtgggccacgccctggaggtggaggaggcgctgctctgcatggacggcgcaggcccgccagacttaagggacctggtcaccacgctcgggggcgccctgctctggctcagcggacacgcggggactcaggctcagggcgctgcccgggtggccgcggcgctggacgacggctcggcccttggccgcttcgagcggatgctggcggcgcagggcgtggatcccggtctggcccgagccctgtgctcgggaagtcccgcagaacgccggcagctgctgcctcgcgcccgggagcaggaggagctgctggcgcccgcagatggcaccgtggagctggtccgggcgctgccgctggcgctggtgctgcacgagctcggggccgggcgcagccgcgctggggagccgctccgcctgggggtgggcgcagagctgctggtcgacgtgggtcagaggctgcgccgtgggaccccctggctccgcgtgcaccgggacggccccgcgctcagcggcccgcagagccgcgccctgcaggaggcgctcgtactctccgaccgcgcgccattcgccgccccctcgcccttcgcagagctcgttctgccgccgcagcaataaagctcctttgccgcg

SEQ ID NO: 581 - DNA, 665 bp, Homo sapiens
cccacgcgtccggttataaagaggtcacatagtcgtgtgggtcgaggattctgtgcctccaggaccaggggcccaccctctgcccagggagtccttgcgtcccatgaggtcttcccgcaaggcctctcagacccagatgtgacggggtgtgtggcccgaggaagctggacagcggcagtgggcctgctgaggccttctcttgaggcctgtgctctgggggtcccttgcttagcctgtgcctggaccagctggcctggggtccctctgaagagaccttggctgctcactgtccacatgtgaactttttctaggtggcaggacaaatcgcgcccatttagaggatgtggctgtaacctgctggatgggactccatagctccttcccaggacccctcagctccccggcactgcagtctgcagagttctcctggaggcaggggctgctgccttgtttcaccttccatgtcaggccagcctgtccctgaaagagaagatggccatgccctccatttgtaagaacaatgccagggcccaggaggaccgcctgccctgcctgggccttggctgggcctctggttctgacactttctgctggaagctgtcaggctgggacaggctttgattttgagggttagcaagacaaagcaaataaatgccttccacctc

SEQ ID NO: 582 - DNA, 533 bp, Homo sapiens
aaaagaaaaactgtaatccatagccccaggcccaacacctgggctgtctcagctgggaacttgtttcaggtcgacttgggtttgagtcgtggccccagaacttcacagttgtgtagtcatggagaagtcagttaacctcagtgaatctcagcatccagtgagaaaatcctcatctcctttatagggatgctggatgtgtgcctagcacagtgcctggcttgcagacagtgtccccaaacagaaccagccctgaataaattgtgtgacacacaggcctcagttcttgaaaaggctttagagaccaggcatgtggcttatgcctataatcccagcactttgagaggctgaggctggaggatcacttgagctcaggagtttgagaccagcctgggcagcacattgagactttgtctctaaaaaaaaaaatcaaaaaaattagcgaggcatggtggcacatgcctgtggtcccagctaccctggaggctgaggtgctgagaattccagcctgggtgacacagtgagatcttgactct

SEQ ID NO: 583 - DNA, 952 bp, Homo sapiens
ctttattcctgtaaatatttctgtgaaaactaggagaacagagatgagatttgacaaaaaaaaattgaattaaaaataacacagtctttttaaaactaacataggaaagcctttcctattatttctcttcttagcttctccattgtctaaatcaggaaaacaggaaaacacagctttctagcagctgcaaaatggtttaatgccccctacatatttccatcaccttgaacaatagctttagcttgggaatctgagatatgatcccagaaaacatctgtctctacttcggctgcaaaacccatggtttaaatctatatggtttgtgcattttctcaactaaaaatagagatgataatccgaattctccatatattcactaatcaaagacactattttcatactagattcctgagacaaatactcactgaagggcttgtttaaaaataaattgtgttttggtctgttcttgtagataatgcccttctattttaggtagaagctctggaatccctttattgtgctgttgctcttatctgcaaggtggcaagcagttcttttcagcagattttgcccactattcctctgagctgaagttctttgcatagatttggcttaagcttgaattagatccctgcaaaggcttgctctgtgatgtcagatgtaattgtaaatgtcagtaatcacttcatgaacgctaaatgagaatgtaagtatttttaaatgtgtgtatttcaaatttgtttgactaattctggaattacaagatttctatgcaggatttaccttcatcctgtgcatgtttcccaaactgtgaggagggaaggctcagagatcgagcttctcctctgagttctaacaaaatggtgctttgagggtcagcctttaggaaggtgcagctttgttgtcctttgagctttctgttatgtgcctatcctaataaactcttaaacac

SEQ ID NO: 584 - DNA, 661 bp, Homo sapiens
ccaaactctccatcacccaggctgtcacgaccaccacccagaggcccagcagcatgactaccacctggaggctcagtagcacaaccaccacaaccggcctcagggtcacacagggcaaacgacgctcagactcttggcacataagtctggagactgctgtgggggtggcagtggctgtcactgtgctcggaatcatgattttgggactgatctgcctcctcaggtggaggagaaggaaaggtcagcagcggactaaagccacaaccccagccagggaacccttccaaaacacagaggagccatatgagaatatcaggaatgaaggacaaaatacagatcccaagctaaatcccaaggatgacggcatcgtctatgcttcccttgccctctccagctccacctcacccagagcacctcccagccaccgtcccctcaagagcccccagaacgagaccctgtactctgtcttaaaggcctaaccaatggacagccctctcaagactgaatggtgaggccaggtacagtggcgcacacctgtaatcccagctactctgaagcctgaggcagaatcaagtgagcccaggagttcagggccagctttgataatggagcgagatgccatctctagttaaaaatatattaacaataaagtaacaaattt

SEQ ID NO: 585 - DNA, 422 bp, Homo sapiens
cccacgcgtccggtgactgtctctccagatggatccctctgtgcttctggaggcaaggatggccaggccatgttatgggatctcaacgaaggcaaacacctttacacgctagatggtggggacatcatcaacgccctgtgcttcagccctaaccgctactggctgtgtgctgccacaggccccagcatcaagatctgggatttagagggaaagatcattgtagatgaactgaagcaagaagttatcagtaccagcagcaaggcagaaccaccccagtgcacctccctggcctggtctgctgatggccagactctgtttgctggctacacggacaacctggtgcgagtgtggcaggtgaccattggcacacgctagaagtttatggcagagctttacaaaaaaaaaaaaaactggcttttctg

SEQ ID NO: 586 - DNA, 924 bp, Homo sapiens
ggcttttctttgtgggctcaagagaaggccatctccctgatgccatctgcatgatccatgttgagcggttcacaccagtgccttctctgctcttcaatggtatcatggcattgatctacttgtgcgtggaagacatcttccagctcattaactactacagcttcagctactggttctttgtggggctttctattgtgggtcagctttatctgcgctggaaggagcctgatcgacctcgtcccctcaagctcagcgttttcttcccgattgtcttctgcctctgcaccatcttcctggtggctgttccactttacagtgatactatcaactccctcatcggcattgccattgccctctcaggcctgcccttttacttcctcatcatcagagtgccagaacataagcgaccgctttacctccgaaggatcgtggggtctgccacaaggtacctccaggtcctgtgtatgtcagttgctgcagaaatggatttggaagatggaggagagatgcccaagcaacgggatcccaagtctaactaaacaccatctggaatcctgatgtggaaagcaggggtttctggtctactggctagagctaaggaagttgaaaaggaaagctcacttctttggaggcacctgtccagaagcctggcctaggcagcttcaacctttgaacttactttttgaaatgaaaagtaatttatttgttttgctacatactgttccagacttttaaaggggacaatgaaggtgactgtggggaggagcatgtcaggtttgggcttggttgttttagaagcacctgggtgtgcctacctactcctcttttcttttaaaagggcccacaatgctccaatttcctgtctcctttagagagacatgaaactatcacaggtgctggatgccaataaaagtttatgttcct

SEQ ID NO: 587 - DNA, 434 bp, Homo sapiens
cttgaggaagagtgagggttccaacttttctgcttatctgggaggtgttgggcgcggacagtcgagatgtcagagaaaaagcagccggtagacttaggtctgttagaggaagacgacgagtttgaagagttccctgccgaagactgggctggcttagatgaagatgaagatgcacatgtctgggaggataattgggatgatgacaatgtagaggatgacttctctaatcagttacgagctgaactagagaaacatggttataagatggagacttcatagcatccagaagaagtgttgaagtaacctaaacttgacctgcttaatacattctagggcagagaacccaggatgggacactaaaaaaatgtgtttatttcattatctgcttggatttatttgtgtttttgtaacacaaaaaataaatgttttgatat

SEQ ID NO: 588 - DNA, 651 bp, Homo sapiens
gcgggcttcagcacactgagccaagtgccttctctgtctcacacttgccttcaggaggccggcatcacagaggagagacacataagaaagctcctatctgcagccagactcttcaaactgccgccaggccctgaggccatgtagccaggcccggaatgggcctctctggacaagagccaccctttcactgtgcatatgatgctgatgcaattcctccatcatctctggacgtgcagaccagatccagaagaaaggcctggcgtgtggccaaacagcgtgaaaccttggcacaggactgaggatcctctcctccagaaaagccccctcgaggaaataaattagtgcggttctctttgacctccaaagacaagacaagcacttatttttattttcagaagacaaaagaaccaagatgccaactggctgcgaatgctctatctccagtctgtctctgtgtactggtagaggctgggaggagtagggggcagcctgttccatttctgatagtgcccttgctcttctgtctgtcatcttgcaggatgcccgagggccagatgggcttagctaggccaaagtaacagactcaagagttattgtacattactgaccacgctcatttgttcaaaagttagaacatctggctgcaccagg

SEQ ID NO: 589 - DNA, 552 bp, Homo sapiens
  misc_feature 527: n = a,c,t, or g
ttctgattcttattccagtgtcctttctagcataccatgttgcctctaaagattgcagctccttatttactagaaaattgttcctgcccaatctacatctccacctcaccccatcttttcttaagcactatgtttgtgtttttatcagtattatattcattgtctttggaatacatgttcttgtttgtgtttggaaaaaaaatctcttttaccagcttgcactcggaccaacttggaaaaaaaaaagcttaaatgtttttgctatgtacagtttaaaaatgtgaagtttgtagctttaactttttgtaagaaaatctaataacactggcttaagtgctgacttgaaatgctattttgtaaggtttggatgtaagtaatcaattgaggtcagcagtttgtatgagacatagcttcctccattgcccccactccttttttcttttttaagtttgagatgcttcctgtgtttttatgttagaattgttgttctccttcttttcttcttcctatacctcatcacgtttgtnttaaataaactgtcctttggaccac

SEQ ID NO: 590 - DNA, 672 bp, Homo sapiens
gctgcgggttctggtcttcctgtcatttgttggggtgcggagactaccagggagtctgaggatggaagagcaccagttccggaggagccagggcagcgaacacaaagccccgcatgcccgggcaggttgggagagtccttctgcctgcgcagcctggctgggttggagcagcgggatggcccttgctgcctggctcacgaaagccccctgtgggagagccccaggcgcgcagggcatgtgggttgtgggaagagcggttccccacgccccggtgtgggtgaactcgatagaggagggtgacaaccaccgggggtgctaattagtaaccacagtggccttcaaagaactcaaatgaaaggaagacttgtacgtctctcactttaagtccagagctagaaatgattaagcctagtgaagatgtagaattttcatagctagagagaagtcaatgcttggcttcaaaacttctttgaggaccactgcagctggtgactttaagttacagccagtgctcattgaccactctgaaaatctcaggacccttaataattatgcaaaatctattctttctgtgctctagaaatggaacatcactgtctgggtgacagcacatctgttaatagcatggtttactgaatatattaatcccacttattgagacctactgctcag

SEQ ID NO: 591 - DNA, 720 bp, Homo sapiens
agcggccgctcgcgatctagacccaatgttacagtcatggttggggaattagttggagcacggcttattgctcatgcaggttctcttttaaatttggccaagcatgcagcttctaccgttcagattcttggagctgaaaaggcacttttcagagccctcaaatctagacgggatacccctaagtatggtctcatttatcatgcttcactcgtgggccagacaagtcccaaacacaaaggaaagatttctcgaatgctggcagccaaaaccgttttggctatccgttatgatgcttttggtgaggattcaagttctgcaatgggagttgagaacagagccaaattagaggccaggttgagaactttggaagacagagggataagaaaaataagtggaacaggaaaagcattagcaaaaacagaaaaatatgaacacaaaagtgaagtgaagacttacgatccttctggtgactccacacttccaacctgttctaaaaaacgcaaaatagaacaggtagataaagaggatgaaattactgaaaagaaagccaaaaaagccaagattaaagttaaagttgaagaagaggaagaagaaaaagtggcagaagaagaagaaacatctgtgaagaagaagaagaaaaggggtaaaaagaaacacattaaggaagaaccactttctgaggaagaaccatgtaccagcacagcaattgctagtccagag

SEQ ID NO: 592 - DNA, 462 bp, Homo sapiens
ctcactgctcactgcaacctctgcctcccaggttcaagcagttctctgtcttggcctcctgagtagctgggaccacaggcacacaccaccacgcctggctaatttttgtatttttagtggagacagagtttcaccatgttgaccaggctggcctaaaacccctgatctcaagtaatctgcctgcctcggcctccaaagtgctggaattacaggcgtaagcactgtgccaggcccatttcatgctattctttaaatttacttcctttgtaaatgaagacactattaatcagtttaattttaatgtgtccaatagaaactaaatgctaactatcgattgcatgcttaattacttttacctttgtcttaactctactgttccttacctaactttttataactactttctgcatttttgcatcttcattttccacccatttttgaataataaaagaaaataacaat

SEQ ID NO: 593 - DNA, 21 bp, Artificial Sequence
  linker sequence
gaattcggccaaagaggccta

SEQ ID NO: 594 - DNA, 21 bp, Artificial Sequence
  linker sequence
gaattcggccttcatggccta

SEQ ID NO: 595 - DNA, 8 bp, Artificial Sequence
  linker sequence
  unsure (7)..(8)
gaattcnn

SEQ ID NO: 596 - DNA, 15 bp, Artificial Sequence
  linker sequence
  unsure (1)..(9)
nnnnnnnnnctcgag

SEQ ID NO: 597 - DNA, 15 bp, Artificial Sequence
  linker sequence
  unsure (1)..(9)
nnnnnnnnngtcgac

SEQ ID NO: 598 - DNA, 24 bp, Artificial Sequence
  linker sequence
acggcctctttggccctcgagaca

What is claimed is:

1. An isolated polynucleotide comprising a nucleotide sequence selected from the group consisting of:
SEQ ID NO:1, SEQ ID NO:2, SEQ ID NO:3, SEQ ID NO:4, SEQ ID NO:5, SEQ ID NO:6, SEQ ID NO:7, SEQ ID NO:8, SEQ ID NO:9, SEQ ID NO:10, SEQ ID NO:11, SEQ ID NO:12, SEQ ID NO:13, SEQ ID NO:14, SEQ ID NO:15, SEQ ID NO:16, SEQ ID NO:17, SEQ ID NO:18, SEQ ID NO:19, SEQ ID NO:20, SEQ ID NO:21, SEQ ID NO:22, SEQ ID NO:23, SEQ ID NO:24, SEQ ID NO:25, SEQ ID NO:26, SEQ ID NO:27, SEQ ID NO:28, SEQ ID NO:29, SEQ ID NO:30, SEQ ID NO:31, SEQ ID NO:32, SEQ ID NO:33, SEQ ID NO:34, SEQ ID NO:35, SEQ ID NO:36, SEQ ID NO:37, SEQ ID NO:38, SEQ ID NO:39, SEQ ID NO:40, SEQ ID NO:41, SEQ ID NO:42, SEQ ID NO:43, SEQ ID NO:44, SEQ ID NO:45, SEQ ID NO:46, SEQ ID NO:47, SEQ ID NO:48, SEQ ID NO:49, SEQ ID NO:50, SEQ ID NO:51, SEQ ID NO:52, SEQ ID NO:53, SEQ ID NO:54, SEQ ID NO:55, SEQ ID NO:56, SEQ ID NO:57, SEQ ID NO:58, SEQ ID NO:59, SEQ ID NO:60, SEQ ID NO:61, SEQ ID NO:62, SEQ ID NO:63, SEQ ID NO:64, SEQ ID NO:65, SEQ ID NO:66, SEQ ID NO:67, SEQ ID NO:68, SEQ ID NO:69, SEQ ID NO:70, SEQ ID NO:71, SEQ ID NO:72, SEQ ID NO:73, SEQ ID NO:74, SEQ ID NO:75, SEQ ID NO:76, SEQ ID NO:77, SEQ ID NO:78, SEQ ID NO:79, SEQ ID NO:80, SEQ ID NO:81, SEQ ID NO:82, SEQ ID NO:83, SEQ ID NO:84, SEQ ID NO:85, SEQ ID NO:86, SEQ ID NO:87, SEQ ID NO:88, SEQ ID NO:89, SEQ ID NO:90, SEQ ID NO:91, SEQ ID NO:92, SEQ ID NO:93, SEQ ID NO:94, SEQ ID NO:95, SEQ ID NO:96, SEQ ID NO:97, SEQ ID NO:98, SEQ ID NO:99, SEQ ID NO:100, SEQ ID NO:101, SEQ ID NO:102, SEQ ID NO:103, SEQ ID NO:104, SEQ ID NO:105, SEQ ID NO:106, SEQ ID NO:107, SEQ ID NO:108, SEQ ID NO:109, SEQ ID NO:110, SEQ ID NO:111, SEQ ID NO:112, SEQ ID NO:113, SEQ ID NO:114, SEQ ID NO:115, SEQ ID NO:116, SEQ ID NO:117, SEQ ID NO:118, SEQ ID NO:119, SEQ ID NO:120, SEQ ID NO:121, SEQ ID NO:122, SEQ ID NO:123, SEQ ID NO:124, SEQ ID NO:125, SEQ ID NO:126, SEQ ID NO:127, SEQ ID NO:128, SEQ ID NO:129, SEQ ID NO:130, SEQ ID NO:131, SEQ ID NO:132, SEQ ID NO:133, SEQ ID NO:134, SEQ ID NO:135, SEQ ID NO:136, SEQ ID NO:137, SEQ ID NO:138, SEQ ID NO:139, SEQ ID NO:140, SEQ ID NO:141, SEQ ID NO:142, SEQ ID NO:143, SEQ ID NO:144, SEQ ID NO:145, SEQ ID NO:146, SEQ ID NO:147, SEQ ID NO:148, SEQ ID NO:149, SEQ ID NO:150, SEQ ID NO:151, SEQ ID NO:152, SEQ ID NO:153, SEQ ID NO:154, SEQ ID NO:155, SEQ ID NO:156, SEQ ID NO:157, SEQ ID NO:158, SEQ ID NO:159, SEQ ID NO:160, SEQ ID NO:161, SEQ ID NO:162, SEQ ID NO:163, SEQ ID NO:164, SEQ ID NO:165, SEQ ID NO:166, SEQ ID NO:167, SEQ ID NO:168, SEQ ID NO:169, SEQ ID NO:170, SEQ ID NO:171, SEQ ID NO:172, SEQ ID NO:173, SEQ ID NO:174, SEQ ID NO:175, SEQ ID NO:176, SEQ ID NO:177, SEQ ID NO:178, SEQ ID NO:179, SEQ ID NO:180, SEQ ID NO:181, SEQ ID NO:182, SEQ ID NO:183, SEQ ID NO:184, SEQ ID NO:185, SEQ ID NO:186, SEQ ID NO:187, SEQ ID NO:188, SEQ ID NO:189, SEQ ID NO:190, SEQ ID NO:191, SEQ ID NO:192, SEQ ID NO:193, SEQ ID NO:194, SEQ ID NO:195, SEQ ID NO:196, SEQ ID NO:197, SEQ ID NO:198, SEQ ID NO:199, SEQ ID NO:200, SEQ ID NO:201, SEQ ID NO:202, SEQ ID NO:203, SEQ ID NO:204, SEQ ID NO:205, SEQ ID NO:206, SEQ ID NO:207, SEQ ID NO:208, SEQ ID NO:209, SEQ ID NO:210, SEQ ID NO:211, SEQ ID NO:212, SEQ ID NO:213, SEQ ID NO:214, SEQ ID NO:215, SEQ ID NO:216, SEQ ID NO:217, SEQ ID NO:218, SEQ ID NO:219, SEQ ID NO:220, SEQ ID NO:221, SEQ ID NO:222, SEQ ID NO:223, SEQ ID NO:224, SEQ ID NO:225, SEQ ID NO:226, SEQ ID NO:227, SEQ ID NO:228, SEQ ID NO:229, SEQ ID NO:230, SEQ ID NO:231, SEQ ID NO:232, SEQ ID NO:233, SEQ ID NO:234, SEQ ID NO:235, SEQ ID NO:236, SEQ ID NO:237, SEQ ID NO:238, SEQ ID NO:239, SEQ ID NO:240, SEQ ID NO:241, SEQ ID NO:242, SEQ ID NO:243, SEQ ID NO:244, SEQ ID NO:245, SEQ ID NO:246, SEQ ID NO:247, SEQ ID NO:248, SEQ ID NO:249, SEQ ID NO:250, SEQ ID NO:251, SEQ ID NO:252, SEQ ID NO:253, SEQ ID NO:254, SEQ ID NO:255, SEQ ID NO:256, SEQ ID NO:257, SEQ ID NO:258, SEQ ID NO:259, SEQ ID NO:260, SEQ ID NO:261, SEQ ID NO:262, SEQ ID NO:263, SEQ ID NO:264, SEQ ID NO:265, SEQ ID NO:266, SEQ ID NO:267, SEQ ID NO:268, SEQ ID NO:269, SEQ ID NO:270, SEQ ID NO:271, SEQ ID NO:272, SEQ ID NO:273, SEQ ID NO:274, SEQ ID NO:275, SEQ ID NO:276, SEQ ID NO:277, SEQ ID NO:278, SEQ ID NO:279, SEQ ID NO:280, SEQ ID NO:281, SEQ ID NO:282, SEQ ID NO:283, SEQ ID NO:284, SEQ ID NO:285, SEQ ID NO:286, SEQ ID NO:287, SEQ ID NO:288, SEQ ID NO:289, SEQ ID NO:290, SEQ ID NO:291, SEQ ID NO:292, SEQ ID NO:293, SEQ ID NO:294, SEQ ID NO:295, SEQ ID NO:296, SEQ ID NO:297, SEQ ID NO:298, SEQ ID NO:299, SEQ ID NO:300, SEQ ID NO:301, SEQ ID NO:302, SEQ ID NO:303, SEQ ID NO:304, SEQ ID NO:305, SEQ ID NO:306, SEQ ID NO:307, SEQ ID NO:308, SEQ ID NO:309, SEQ ID NO:310, SEQ ID NO:311, SEQ ID NO:312, SEQ ID NO:313, SEQ ID NO:314, SEQ ID NO:315, SEQ ID NO:316, SEQ ID NO:317, SEQ ID NO:318, SEQ ID NO:319, SEQ ID NO:320, SEQ ID NO:321, SEQ ID NO:322, SEQ ID NO:323, SEQ ID NO:324, SEQ ID NO:325, SEQ ID NO:326, SEQ ID NO:327, SEQ ID NO:328, SEQ ID NO:329, SEQ ID NO:330, SEQ ID NO:331, SEQ ID NO:332, SEQ ID NO:333, SEQ ID NO:334, SEQ ID NO:335, SEQ ID NO:336, SEQ ID NO:337, SEQ ID NO:338, SEQ ID NO:339, SEQ ID NO:340, SEQ ID NO:341, SEQ ID NO:342, SEQ ID NO:343, SEQ ID NO:344, SEQ ID NO:345, SEQ ID NO:346, SEQ ID NO:347, SEQ ID NO:348, SEQ ID NO:349, SEQ ID NO:350, SEQ ID NO:351, SEQ ID NO:352, SEQ ID NO:353, SEQ ID NO:354, SEQ ID NO:355, SEQ ID NO:356, SEQ ID NO:357, SEQ ID NO:358, SEQ ID NO:359, SEQ ID NO:360, SEQ ID NO:361, SEQ ID NO:362, SEQ ID NO:363, SEQ ID NO:364, SEQ ID NO:365, SEQ ID NO:366, SEQ ID NO:367, SEQ ID NO:368, SEQ ID NO:369, SEQ ID NO:370, SEQ ID NO:371, SEQ ID NO:372, SEQ ID NO:373, SEQ ID NO:374, SEQ ID NO:375, SEQ ID NO:376, SEQ ID NO:377, SEQ ID NO:378, SEQ ID NO:379, SEQ ID NO:380, SEQ ID NO:381, SEQ ID NO:382, SEQ ID NO:383, SEQ ID NO:384, SEQ ID NO:385, SEQ ID NO:386, SEQ ID NO:387, SEQ ID NO:388, SEQ ID NO:389, SEQ ID NO:390, SEQ ID NO:391, SEQ ID NO:392, SEQ ID NO:393, SEQ ID NO:394, SEQ ID NO:395, SEQ ID NO:396, SEQ ID NO:397, SEQ ID NO:398, SEQ ID NO:399, SEQ ID NO:400, SEQ ID NO:401, SEQ ID NO:402, SEQ ID NO:403, SEQ ID NO:404, SEQ ID NO:405, SEQ ID NO:406, SEQ ID NO:407, SEQ ID NO:408, SEQ ID NO:409, SEQ ID NO:410, SEQ ID NO:411, SEQ ID NO:412, SEQ ID NO:413, SEQ ID NO:414, SEQ ID NO:415, SEQ ID NO:416, SEQ ID NO:417, SEQ ID NO:418, SEQ ID NO:419, SEQ ID NO:420, SEQ ID NO:421, SEQ ID NO:422, SEQ ID NO:423, SEQ ID NO:424, SEQ ID NO:425, SEQ ID NO:426, SEQ ID NO:427, SEQ ID NO:428, SEQ ID NO:429, SEQ ID NO:430, SEQ ID NO:431, SEQ ID NO:432, SEQ ID NO:433, SEQ ID NO:434, SEQ ID NO:435, SEQ ID NO:436, SEQ ID NO:437, SEQ ID NO:438, SEQ ID NO:439, SEQ ID NO:440, SEQ ID NO:441, SEQ ID NO:442, SEQ ID NO:443, SEQ ID NO:444, SEQ ID NO:445, SEQ ID NO:446, SEQ ID NO:447, SEQ ID NO:448, SEQ ID NO:449, SEQ ID NO:450, SEQ ID NO:451, SEQ ID NO:452, SEQ ID NO:453, SEQ ID NO:454, SEQ ID NO:455, SEQ ID NO:456, SEQ ID NO:457, SEQ ID NO:458, SEQ ID NO:459, SEQ ID NO:460, SEQ ID NO:461, SEQ ID NO:462, SEQ ID NO:463, SEQ ID NO:464, SEQ ID NO:465, SEQ ID NO:466, SEQ ID NO:467, SEQ ID NO:468, SEQ ID NO:469, SEQ ID NO:470, SEQ ID NO:471, SEQ ID NO:472, SEQ ID NO:473, SEQ ID NO:474, SEQ ID NO:475, SEQ ID NO:476, SEQ ID NO:477, SEQ ID NO:478, SEQ ID NO:479, SEQ ID NO:480, SEQ ID NO:481, SEQ ID NO:482, SEQ ID NO:483, SEQ ID NO:484, SEQ ID NO:485, SEQ ID NO:486, SEQ ID NO:487, SEQ ID NO:488, SEQ ID NO:489, SEQ ID NO:490, SEQ ID NO:491, SEQ ID NO:492, SEQ ID NO:493, SEQ ID NO:494, SEQ ID NO:495, SEQ ID NO:496, SEQ ID NO:497, SEQ ID NO:498, SEQ ID NO:499, SEQ ID NO:500, SEQ ID NO:501, SEQ ID NO:502, SEQ ID NO:503, SEQ ID NO:504, SEQ ID NO:505, SEQ ID NO:506, SEQ ID NO:507, SEQ ID NO:508, SEQ ID NO:509, SEQ ID NO:510, SEQ ID NO:511, SEQ ID NO:512, SEQ ID NO:513, SEQ ID NO:514, SEQ ID NO:515, SEQ ID NO:516, SEQ ID NO:517, SEQ ID NO:518, SEQ ID NO:519, SEQ ID NO:520, SEQ ID NO:521, SEQ ID NO:522, SEQ ID NO:523, SEQ ID NO:524, SEQ ID NO:525, SEQ ID NO:526, SEQ ID NO:527, SEQ ID NO:528, SEQ ID NO:529, SEQ ID NO:530, SEQ ID NO:531, SEQ ID NO:532, SEQ ID NO:533, SEQ ID NO:534, SEQ ID NO:535, SEQ ID NO:536, SEQ ID NO:537, SEQ ID NO:538, SEQ ID NO:539, SEQ ID NO:540, SEQ ID NO:541, SEQ ID NO:542, SEQ ID NO:543, SEQ ID NO:544, SEQ ID NO:545, SEQ ID NO:546, SEQ ID NO:547, SEQ ID NO:548, SEQ ID NO:549, SEQ ID NO:550, SEQ ID NO:551, SEQ ID NO:552, SEQ ID NO:553, SEQ ID NO:554, SEQ ID NO:555, SEQ ID NO:556, SEQ ID NO:557, SEQ ID NO:558, SEQ ID NO:559, SEQ ID NO:560, SEQ ID NO:561, SEQ ID NO:562, SEQ ID NO:563, SEQ ID NO:564, SEQ ID NO:565, SEQ ID NO:566, SEQ ID NO:567, SEQ ID NO:568, SEQ ID NO:569, SEQ ID NO:570, SEQ ID NO:571, SEQ ID NO:572, SEQ ID NO:573, SEQ ID NO:574, SEQ ID NO:575, SEQ ID NO:576, SEQ ID NO:577, SEQ ID NO:578, SEQ ID NO:579, SEQ ID NO:580, SEQ ID NO:581, SEQ ID NO:582, SEQ ID NO:583, SEQ ID NO:584, SEQ ID NO:585, SEQ ID NO:586, SEQ ID NO:587, SEQ ID NO:588, SEQ ID NO:589, SEQ ID NO:590, SEQ ID NO:591, SEQ ID NO:592;
or a complement of said sequence.

2. An isolated polynucleotide consisting of a nucleotide sequence selected from the group consisting of:
SEQ ID NO:1, SEQ ID NO:2, SEQ ID NO:3, SEQ ID NO:4, SEQ ID NO:5, SEQ ID NO:6, SEQ ID NO:7, SEQ ID NO:8, SEQ ID NO:9, SEQ ID NO:10, SEQ ID NO:11, SEQ ID NO:12, SEQ ID NO:13, SEQ ID NO:14, SEQ ID NO:15, SEQ ID NO:16, SEQ ID NO:17, SEQ ID NO:18, SEQ ID NO:19, SEQ ID NO:20, SEQ ID NO:21, SEQ ID NO:22, SEQ ID NO:23, SEQ ID NO:24, SEQ ID NO:25, SEQ ID NO:26, SEQ ID NO:27, SEQ ID NO:28, SEQ ID NO:29, SEQ ID NO:30, SEQ ID NO:31, SEQ ID NO:32, SEQ ID NO:33, SEQ ID NO:34, SEQ ID NO:35, SEQ ID NO:36, SEQ ID NO:37, SEQ ID NO:38, SEQ ID NO:39, SEQ ID NO:40, SEQ ID NO:41, SEQ ID NO:42, SEQ ID NO:43, SEQ ID NO:44, SEQ ID NO:45, SEQ ID NO:46, SEQ ID NO:47, SEQ ID NO:48, SEQ ID NO:49, SEQ ID NO:50, SEQ ID NO:51, SEQ ID NO:52, SEQ ID NO:53, SEQ ID NO:54, SEQ ID NO:55, SEQ ID NO:56, SEQ ID NO:57, SEQ ID NO:58, SEQ ID NO:59, SEQ ID NO:60, SEQ ID NO:61, SEQ ID NO:62, SEQ ID NO:63, SEQ ID NO:64, SEQ ID NO:65, SEQ ID NO:66, SEQ ID NO:67, SEQ ID NO:68, SEQ ID NO:69, SEQ ID NO:70, SEQ ID NO:71, SEQ ID NO:72, SEQ ID NO:73, SEQ ID NO:74, SEQ ID NO:75, SEQ ID NO:76, SEQ ID NO:77, SEQ ID NO:78, SEQ ID NO:79, SEQ ID NO:80, SEQ ID NO:81, SEQ ID NO:82, SEQ ID NO:83, SEQ ID NO:84, SEQ ID NO:85, SEQ ID NO:86, SEQ ID NO:87, SEQ ID NO:88, SEQ ID NO:89, SEQ ID NO:90, SEQ ID NO:91, SEQ ID NO:92, SEQ ID NO:93, SEQ ID NO:94, SEQ ID NO:95, SEQ ID NO:96, SEQ ID NO:97, SEQ ID NO:98, SEQ ID NO:99, SEQ ID NO:100, SEQ ID NO:101, SEQ ID NO:102, SEQ ID NO:103, SEQ ID NO:104, SEQ ID NO:105, SEQ ID NO:106, SEQ ID NO:107, SEQ ID NO:108, SEQ ID NO:109, SEQ ID NO:110, SEQ ID NO:111, SEQ ID NO:112, SEQ ID NO:113, SEQ ID NO:114, SEQ ID NO:115, SEQ ID NO:116, SEQ ID NO:117, SEQ ID NO:118, SEQ ID NO:119, SEQ ID NO:120, SEQ ID NO:121, SEQ ID NO:122, SEQ ID NO:123, SEQ ID NO:124, SEQ ID NO:125, SEQ ID NO:126, SEQ ID NO:127, SEQ ID NO:128, SEQ ID NO:129, SEQ ID NO:130, SEQ ID NO:131, SEQ ID NO:132, SEQ ID NO:133, SEQ ID NO:134, SEQ ID NO:135, SEQ ID NO:136, SEQ ID NO:137, SEQ ID NO:138, SEQ ID NO:139, SEQ ID NO:140, SEQ ID NO:141, SEQ ID NO:142, SEQ ID NO:143, SEQ ID NO:144, SEQ ID NO:145, SEQ ID NO:146, SEQ ID NO:147, SEQ ID NO:148, SEQ ID NO:149, SEQ ID NO:150, SEQ ID NO:151, SEQ ID NO:152, SEQ ID NO:153, SEQ ID NO:154, SEQ ID NO:155, SEQ ID NO:156, SEQ ID NO:157, SEQ ID NO:158, SEQ ID NO:159, SEQ ID NO:160, SEQ ID NO:161, SEQ ID NO:162, SEQ ID NO:163, SEQ ID NO:164, SEQ ID NO:165, SEQ ID NO:166, SEQ ID NO:167, SEQ ID NO:168, SEQ ID NO:169, SEQ ID NO:170, SEQ ID NO:171, SEQ ID NO:172, SEQ ID NO:173, SEQ ID NO:174, SEQ ID NO:175, SEQ ID NO:176, SEQ ID NO:177, SEQ ID NO:178, SEQ ID NO:179, SEQ ID NO:180, SEQ ID NO:181, SEQ ID NO:182, SEQ ID NO:183, SEQ ID NO:184, SEQ ID NO:185, SEQ ID NO:186, SEQ ID NO:187, SEQ ID NO:188, SEQ ID NO:189, SEQ ID NO:190, SEQ ID NO:191, SEQ ID NO:192, SEQ ID NO:193, SEQ ID NO:194, SEQ ID NO:195, SEQ ID NO:196, SEQ ID NO:197, SEQ ID NO:198, SEQ ID NO:199, SEQ ID NO:200, SEQ ID NO:201, SEQ ID NO:202, SEQ ID NO:203, SEQ ID NO:204, SEQ ID NO:205, SEQ ID NO:206, SEQ ID NO:207, SEQ ID NO:208, SEQ ID NO:209, SEQ ID NO:210, SEQ ID NO:211, SEQ ID NO:212, SEQ ID NO:213, SEQ ID NO:214, SEQ ID NO:215, SEQ ID NO:216, SEQ ID NO:217, SEQ ID NO:218, SEQ ID NO:219, SEQ ID NO:220, SEQ ID NO:221, SEQ ID NO:222, SEQ ID NO:223, SEQ ID NO:224, SEQ ID NO:225, SEQ ID NO:226, SEQ ID NO:227, SEQ ID NO:228, SEQ ID NO:229, SEQ ID NO:230, SEQ ID NO:231, SEQ ID NO:232, SEQ ID NO:233, SEQ ID NO:234, SEQ ID NO:235, SEQ ID NO:236, SEQ ID NO:237, SEQ ID NO:238, SEQ ID NO:239, SEQ ID NO:240, SEQ ID NO:241, SEQ ID NO:242, SEQ ID NO:243, SEQ ID NO:244, SEQ ID NO:245, SEQ ID NO:246, SEQ ID NO:247, SEQ ID NO:248, SEQ ID NO:249, SEQ ID NO:250, SEQ ID NO:251, SEQ ID NO:252, SEQ ID NO:253, SEQ ID NO:254, SEQ ID NO:255, SEQ ID NO:256, SEQ ID NO:257, SEQ ID NO:258, SEQ ID NO:259, SEQ ID NO:260, SEQ ID NO:261, SEQ ID NO:262, SEQ ID NO:263, SEQ ID NO:264, SEQ ID NO:265, SEQ ID NO:266, SEQ ID NO:267, SEQ ID NO:268, SEQ ID NO:269, SEQ ID NO:270, SEQ ID NO:271, SEQ ID NO:272, SEQ ID NO:273, SEQ ID NO:274, SEQ ID NO:275, SEQ ID NO:276, SEQ ID NO:277, SEQ ID NO:278, SEQ ID NO:279, SEQ ID NO:280, SEQ ID NO:281, SEQ ID NO:282, SEQ ID NO:283, SEQ ID NO:284, SEQ ID NO:285, SEQ ID NO:286, SEQ ID NO:287, SEQ ID NO:288, SEQ ID NO:289, SEQ ID NO:290, SEQ ID NO:291, SEQ ID NO:292, SEQ ID NO:293, SEQ ID NO:294, SEQ ID NO:295, SEQ ID NO:296, SEQ ID NO:297, SEQ ID NO:298, SEQ ID NO:299, SEQ ID NO:300, SEQ ID NO:301, SEQ ID NO:302, SEQ ID NO:303, SEQ ID NO:304, SEQ ID NO:305, SEQ ID NO:306, SEQ ID NO:307, SEQ ID NO:308, SEQ ID NO:309, SEQ ID NO:310, SEQ ID NO:311, SEQ ID NO:312, SEQ ID NO:313, SEQ ID NO:314, SEQ ID NO:315, SEQ ID NO:316, SEQ ID NO:317, SEQ ID NO:318, SEQ ID NO:319, SEQ ID NO:320, SEQ ID NO:321, SEQ ID NO:322, SEQ ID NO:323, SEQ ID NO:324, SEQ ID NO:325, SEQ ID NO:326, SEQ ID NO:327, SEQ ID NO:328, SEQ ID NO:329, SEQ ID NO:330, SEQ ID NO:331, SEQ ID NO:332, SEQ ID NO:333, SEQ ID NO:334, SEQ ID NO:335, SEQ ID NO:336, SEQ ID NO:337, SEQ ID NO:338, SEQ ID NO:339, SEQ ID NO:340, SEQ ID NO:341, SEQ ID NO:342, SEQ ID NO:343, SEQ ID NO:344, SEQ ID NO:345, SEQ ID NO:346, SEQ ID NO:347, SEQ ID NO:348, SEQ ID NO:349, SEQ ID NO:350, SEQ ID NO:351, SEQ ID NO:352, SEQ ID NO:353, SEQ ID NO:354, SEQ ID NO:355, SEQ ID NO:356, SEQ ID NO:357, SEQ ID NO:358, SEQ ID NO:359, SEQ ID NO:360, SEQ ID NO:361, SEQ ID NO:362, SEQ ID NO:363, SEQ ID NO:364, SEQ ID NO:365, SEQ ID NO:366, SEQ ID NO:367, SEQ ID NO:368, SEQ ID NO:369, SEQ ID NO:370, SEQ ID NO:371, SEQ ID NO:372, SEQ ID NO:373, SEQ ID NO:374, SEQ ID NO:375, SEQ ID NO:376, SEQ ID NO:377, SEQ ID NO:378, SEQ ID NO:379, SEQ ID NO:380, SEQ ID NO:381, SEQ ID NO:382, SEQ ID NO:383, SEQ ID NO:384, SEQ ID NO:385, SEQ ID NO:386, SEQ ID NO:387, SEQ ID NO:388, SEQ ID NO:389, SEQ ID NO:390, SEQ ID NO:391, SEQ ID NO:392, SEQ ID NO:393, SEQ ID NO:394, SEQ ID NO:395, SEQ ID NO:396, SEQ ID NO:397, SEQ ID NO:398, SEQ ID NO:399, SEQ ID NO:400, SEQ ID NO:401, SEQ ID NO:402, SEQ ID NO:403, SEQ ID NO:404, SEQ ID NO:405, SEQ ID NO:406, SEQ ID NO:407, SEQ ID NO:408, SEQ ID NO:409, SEQ ID NO:410, SEQ ID NO:411, SEQ ID NO:412, SEQ ID NO:413, SEQ ID NO:414, SEQ ID NO:415, SEQ ID NO:416, SEQ ID NO:417, SEQ ID NO:418, SEQ ID NO:419, SEQ ID NO:420, SEQ ID NO:421, SEQ ID NO:422, SEQ ID NO:423, SEQ ID NO:424, SEQ ID NO:425, SEQ ID NO:426, SEQ ID NO:427, SEQ ID NO:428, SEQ ID NO:429, SEQ ID NO:430, SEQ ID NO:431, SEQ ID NO:432, SEQ ID NO:433, SEQ ID NO:434, SEQ ID NO:435, SEQ ID NO:436, SEQ ID NO:437, SEQ ID NO:438, SEQ ID NO:439, SEQ ID NO:440, SEQ ID NO:441, SEQ ID NO:442, SEQ ID NO:443, SEQ ID NO:444, SEQ ID NO:445, SEQ ID NO:446, SEQ ID NO:447, SEQ ID NO:448, SEQ ID NO:449, SEQ ID NO:450, SEQ ID NO:451, SEQ ID NO:452, SEQ ID NO:453, SEQ ID NO:454, SEQ ID NO:455, SEQ ID NO:456, SEQ ID NO:457, SEQ ID NO:458, SEQ ID NO:459, SEQ ID NO:460, SEQ ID NO:461, SEQ ID NO:462, SEQ ID NO:463, SEQ ID NO:464, SEQ ID NO:465, SEQ ID NO:466, SEQ ID NO:467, SEQ ID NO:468, SEQ ID NO:469, SEQ ID NO:470, SEQ ID NO:471, SEQ ID NO:472, SEQ ID NO:473, SEQ ID NO:474, SEQ ID NO:475, SEQ ID NO:476, SEQ ID NO:477, SEQ ID NO:478, SEQ ID NO:479, SEQ ID NO:480, SEQ ID NO:481, SEQ ID NO:482, SEQ ID NO:483, SEQ ID NO:484, SEQ ID NO:485, SEQ ID NO:486, SEQ ID NO:487, SEQ ID NO:488, SEQ ID NO:489, SEQ ID NO:490, SEQ ID NO:491, SEQ ID NO:492, SEQ ID NO:493, SEQ ID NO:494, SEQ ID NO:495, SEQ ID NO:496, SEQ ID NO:497, SEQ ID NO:498, SEQ ID NO:499, SEQ ID NO:500, SEQ ID NO:501, SEQ ID NO:502, SEQ ID NO:503, SEQ ID NO:504, SEQ ID NO:505, SEQ ID NO:506, SEQ ID NO:507, SEQ ID NO:508, SEQ ID NO:509, SEQ ID NO:510, SEQ ID NO:511, SEQ ID NO:512, SEQ ID NO:513, SEQ ID NO:514, SEQ ID NO:515, SEQ ID NO:516, SEQ ID NO:517, SEQ ID NO:518, SEQ ID NO:519, SEQ ID NO:520, SEQ ID NO:521, SEQ ID NO:522, SEQ ID NO:523, SEQ ID NO:524, SEQ ID NO:525, SEQ ID NO:526, SEQ ID NO:527, SEQ ID NO:528, SEQ ID NO:529, SEQ ID NO:530, SEQ ID NO:531, SEQ ID NO:532, SEQ ID NO:533, SEQ ID NO:534, SEQ ID NO:535, SEQ ID NO:536, SEQ ID NO:537, SEQ ID NO:538, SEQ ID NO:539, SEQ ID NO:540, SEQ ID NO:541, SEQ ID NO:542, SEQ ID NO:543, SEQ ID NO:544, SEQ ID NO:545, SEQ ID NO:546, SEQ ID NO:547, SEQ ID NO:548, SEQ ID NO:549, SEQ ID NO:550, SEQ ID NO:551, SEQ ID NO:552, SEQ ID NO:553, SEQ ID NO:554, SEQ ID NO:555, SEQ ID NO:556, SEQ ID NO:557, SEQ ID NO:558, SEQ ID NO:559, SEQ ID NO:560, SEQ ID NO:561, SEQ ID NO:562, SEQ ID NO:563, SEQ ID NO:564, SEQ ID NO:565, SEQ ID NO:566, SEQ ID NO:567, SEQ ID NO:568, SEQ ID NO:569, SEQ ID NO:570, SEQ ID NO:571, SEQ ID NO:572, SEQ ID NO:573, SEQ ID NO:574, SEQ ID NO:575, SEQ ID NO:576, SEQ ID NO:577, SEQ ID NO:578, SEQ ID NO:579, SEQ ID NO:580, SEQ ID NO:581, SEQ ID NO:582, SEQ ID NO:583, SEQ ID NO:584, SEQ ID NO:585, SEQ ID NO:586, SEQ ID NO:587, SEQ ID NO:588, SEQ ID NO:589, SEQ ID NO:590, SEQ ID NO:591, SEQ ID NO:592;
or a complement of said sequence.

3. An isolated polynucleotide comprising a nucleotide sequence which hybridizes to a sequence selected from the group consisting of:
SEQ ID NO:1, SEQ ID NO:2, SEQ ID NO:3, SEQ ID NO:4, SEQ ID NO:5, SEQ ID NO:6, SEQ ID NO:7, SEQ ID NO:8, SEQ ID NO:9, SEQ ID NO:10, SEQ ID NO:11, SEQ ID NO:12, SEQ ID NO:13, SEQ ID NO:14, SEQ ID NO:15, SEQ ID NO:16, SEQ ID NO:17, SEQ ID NO:18, SEQ ID NO:19, SEQ ID NO:20, SEQ ID NO:21, SEQ ID NO:22, SEQ ID NO:23, SEQ ID NO:24, SEQ ID NO:25, SEQ ID NO:26, SEQ ID NO:27, SEQ ID NO:28, SEQ ID NO:29, SEQ ID NO:30, SEQ ID NO:31, SEQ ID NO:32, SEQ ID NO:33, SEQ ID NO:34, SEQ ID NO:35, SEQ ID NO:36, SEQ ID NO:37, SEQ ID NO:38, SEQ ID NO:39, SEQ ID NO:40, SEQ ID NO:41, SEQ ID NO:42, SEQ ID NO:43, SEQ ID NO:44, SEQ ID NO:45, SEQ ID NO:46, SEQ ID NO:47, SEQ ID NO:48, SEQ ID NO:49, SEQ ID NO:50, SEQ ID NO:51, SEQ ID NO:52, SEQ ID NO:53, SEQ ID NO:54, SEQ ID NO:55, SEQ ID NO:56, SEQ ID NO:57, SEQ ID NO:58, SEQ ID NO:59, SEQ ID NO:60, SEQ ID NO:61, SEQ ID NO:62, SEQ ID NO:63, SEQ ID NO:64, SEQ ID NO:65, SEQ ID NO:66, SEQ ID NO:67, SEQ ID NO:68, SEQ ID NO:69, SEQ ID NO:70, SEQ ID NO:71, SEQ ID NO:72, SEQ ID NO:73, SEQ ID NO:74, SEQ ID NO:75, SEQ ID NO:76, SEQ ID NO:77, SEQ ID NO:78, SEQ ID NO:79, SEQ ID NO:80, SEQ ID NO:81, SEQ ID NO:82, SEQ ID NO:83, SEQ ID NO:84, SEQ ID NO:85, SEQ ID NO:86, SEQ ID NO:87, SEQ ID NO:88, SEQ ID NO:89, SEQ ID NO:90, SEQ ID NO:91, SEQ ID NO:92, SEQ ID NO:93, SEQ ID NO:94, SEQ ID NO:95, SEQ ID NO:96, SEQ ID NO:97, SEQ ID NO:98, SEQ ID NO:99, SEQ ID NO:100, SEQ ID NO:101, SEQ ID NO:102, SEQ ID NO:103, SEQ ID NO:104, SEQ ID NO:105, SEQ ID NO:106, SEQ ID NO:107, SEQ ID NO:108, SEQ ID NO:109, SEQ ID NO:110, SEQ ID NO:111, SEQ ID NO:112, SEQ ID NO:113, SEQ ID NO:114, SEQ ID NO:115, SEQ ID NO:116, SEQ ID NO:117, SEQ ID NO:118, SEQ ID NO:119, SEQ ID NO:120, SEQ ID NO:121, SEQ ID NO:122, SEQ ID NO:123, SEQ ID NO:124, SEQ ID NO:125, SEQ ID NO:126, SEQ ID NO:127, SEQ ID NO:128, SEQ ID NO:129, SEQ ID NO:130, SEQ ID NO:131, SEQ ID NO:132, SEQ ID NO:133, SEQ ID NO:134, SEQ ID NO:135, SEQ ID NO:136, SEQ ID NO:137, SEQ ID NO:138, SEQ ID NO:139, SEQ ID NO:140, SEQ ID NO:141, SEQ ID NO:142, SEQ ID NO:143, SEQ ID NO:144, SEQ ID NO:145, SEQ ID NO:146, SEQ ID NO:147, SEQ ID NO:148, SEQ ID NO:149, SEQ ID NO:150, SEQ ID NO:151, SEQ ID NO:152, SEQ ID NO:153, SEQ ID NO:154, SEQ ID NO:155, SEQ ID NO:156, SEQ ID NO:157, SEQ ID NO:158, SEQ ID NO:159, SEQ ID NO:160, SEQ ID NO:161, SEQ ID NO:162, SEQ ID NO:163, SEQ ID NO:164, SEQ ID NO:165, SEQ ID NO:166, SEQ ID NO:167, SEQ ID NO:168, SEQ ID NO:169, SEQ ID NO:170, SEQ ID NO:171, SEQ ID NO:172, SEQ ID NO:173, SEQ ID NO:174, SEQ ID NO:175, SEQ ID NO:176, SEQ ID NO:177, SEQ ID NO:178, SEQ ID NO:179, SEQ ID NO:180, SEQ ID NO:181, SEQ ID NO:182, SEQ ID NO:183, SEQ ID NO:184, SEQ ID NO:185, SEQ ID NO:186, SEQ ID NO:187, SEQ ID NO:188, SEQ ID NO:189, SEQ ID NO:190, SEQ ID NO:191, SEQ ID NO:192, SEQ ID NO:193, SEQ ID NO:194, SEQ ID NO:195, SEQ ID NO:196, SEQ ID NO:197, SEQ ID NO:198, SEQ ID NO:199, SEQ ID NO:200, SEQ ID NO:201, SEQ ID NO:202, SEQ ID NO:203, SEQ ID NO:204, SEQ ID NO:205, SEQ ID NO:206, SEQ ID NO:207, SEQ ID NO:208, SEQ ID NO:209, SEQ ID NO:210, SEQ ID NO:211, SEQ ID NO:212, SEQ ID NO:213, SEQ ID NO:214, SEQ ID NO:215, SEQ ID NO:216, SEQ ID NO:217, SEQ ID NO:218, SEQ ID NO:219, SEQ ID NO:220, SEQ ID NO:221, SEQ ID NO:222, SEQ ID NO:223, SEQ ID NO:224, SEQ ID NO:225, SEQ ID NO:226, SEQ ID NO:227, SEQ ID NO:228, SEQ ID NO:229, SEQ ID NO:230, SEQ ID NO:231, SEQ ID NO:232, SEQ ID NO:233, SEQ ID NO:234, SEQ ID NO:235, SEQ ID NO:236, SEQ ID NO:237, SEQ ID NO:238, SEQ ID NO:239, SEQ ID NO:240, SEQ ID NO:241, SEQ ID NO:242, SEQ ID NO:243, SEQ ID NO:244, SEQ ID NO:245, SEQ ID NO:246, SEQ ID NO:247, SEQ ID NO:248, SEQ ID NO:249, SEQ ID NO:250, SEQ ID NO:251, SEQ ID NO:252, SEQ ID NO:253, SEQ ID NO:254, SEQ ID NO:255, SEQ ID NO:256, SEQ ID NO:257, SEQ ID NO:258, SEQ ID NO:259, SEQ ID NO:260, SEQ ID NO:261, SEQ ID NO:262, SEQ ID NO:263, SEQ ID NO:264, SEQ ID NO:265, SEQ ID NO:266, SEQ ID NO:267, SEQ ID NO:268, SEQ ID NO:269, SEQ ID NO:270, SEQ ID NO:271, SEQ ID NO:272, SEQ ID NO:273, SEQ ID NO:274, SEQ ID NO:275, SEQ ID NO:276, SEQ ID NO:277, SEQ ID NO:278, SEQ ID NO:279, SEQ ID NO:280, SEQ ID NO:281, SEQ ID NO:282, SEQ ID NO:283, SEQ ID NO:284, SEQ ID NO:285, SEQ ID NO:286, SEQ ID NO:287, SEQ ID NO:288, SEQ ID NO:289, SEQ ID NO:290, SEQ ID NO:291, SEQ ID NO:292, SEQ ID NO:293, SEQ ID NO:294, SEQ ID NO:295, SEQ ID NO:296, SEQ ID NO:297, SEQ ID NO:298, SEQ ID NO:299, SEQ ID NO:300, SEQ ID NO:301, SEQ ID NO:302, SEQ ID NO:303, SEQ ID NO:304, SEQ ID NO:305, SEQ ID NO:306, SEQ ID NO:307, SEQ ID NO:308, SEQ ID NO:309, SEQ ID NO:310, SEQ ID NO:311, SEQ ID NO:312, SEQ ID NO:313, SEQ ID NO:314, SEQ ID NO:315, SEQ ID NO:316, SEQ ID NO:317, SEQ ID NO:318, SEQ ID NO:319, SEQ ID NO:320, SEQ ID NO:321, SEQ ID NO:322, SEQ ID NO:323, SEQ ID NO:324, SEQ ID NO:325, SEQ ID NO:326, SEQ ID NO:327, SEQ ID NO:328, SEQ ID NO:329, SEQ ID NO:330, SEQ ID NO:331, SEQ ID NO:332, SEQ ID NO:333, SEQ ID NO:334, SEQ ID NO:335, SEQ ID NO:336, SEQ ID NO:337, SEQ ID NO:338, SEQ ID NO:339, SEQ ID NO:340, SEQ ID NO:341, SEQ ID NO:342, SEQ ID NO:343, SEQ ID NO:344, SEQ ID NO:345, SEQ ID NO:346, SEQ ID NO:347, SEQ ID NO:348, SEQ ID NO:349, SEQ ID NO:350, SEQ ID NO:351, SEQ ID NO:352, SEQ ID NO:353, SEQ ID NO:354, SEQ ID NO:355, SEQ ID NO:356, SEQ ID NO:357, SEQ ID NO:358, SEQ ID NO:359, SEQ ID NO:360, SEQ ID NO:361, SEQ ID NO:362, SEQ ID NO:363, SEQ ID NO:364, SEQ ID NO:365, SEQ ID NO:366, SEQ ID NO:367, SEQ ID NO:368, SEQ ID NO:369, SEQ ID NO:370, SEQ ID NO:371, SEQ ID NO:372, SEQ ID NO:373, SEQ ID NO:374, SEQ ID NO:375, SEQ ID NO:376, SEQ ID NO:377, SEQ ID NO:378, SEQ ID NO:379, SEQ ID NO:380, SEQ ID NO:381, SEQ ID NO:382, SEQ ID NO:383, SEQ ID NO:384, SEQ ID NO:385, SEQ ID NO:386, SEQ ID NO:387, SEQ ID NO:388, SEQ ID NO:389, SEQ ID NO:390, SEQ ID NO:391, SEQ ID NO:392, SEQ ID NO:393, SEQ ID NO:394, SEQ ID NO:395, SEQ ID NO:396, SEQ ID NO:397, SEQ ID NO:398, SEQ ID NO:399, SEQ ID NO:400, SEQ ID NO:401, SEQ ID NO:402, SEQ ID NO:403, SEQ ID NO:404, SEQ ID NO:405, SEQ ID NO:406, SEQ ID NO:407, SEQ ID NO:408, SEQ ID NO:409, SEQ ID NO:410, SEQ ID NO:411, SEQ ID NO:412, SEQ ID NO:413, SEQ ID NO:414, SEQ ID NO:415, SEQ ID NO:416, SEQ ID NO:417, SEQ ID NO:418, SEQ ID NO:419, SEQ ID NO:420, SEQ ID NO:421, SEQ ID NO:422, SEQ ID NO:423, SEQ ID NO:424, SEQ ID NO:425, SEQ ID NO:426, SEQ ID NO:427, SEQ ID NO:428, SEQ ID NO:429, SEQ ID NO:430, SEQ ID NO:431, SEQ ID NO:432, SEQ ID NO:433, SEQ ID NO:434, SEQ ID NO:435, SEQ ID NO:436, SEQ ID NO:437, SEQ ID NO:438, SEQ ID NO:439, SEQ ID NO:440, SEQ ID NO:441, SEQ ID NO:442, SEQ ID NO:443, SEQ ID NO:444, SEQ ID NO:445, SEQ ID NO:446, SEQ ID NO:447, SEQ ID NO:448, SEQ ID NO:449, SEQ ID NO:450, SEQ ID NO:451, SEQ ID NO:452, SEQ ID NO:453, SEQ ID NO:454, SEQ ID NO:455, SEQ ID NO:456, SEQ ID NO:457, SEQ ID NO:458, SEQ ID NO:459, SEQ ID NO:460, SEQ ID NO:461, SEQ ID NO:462, SEQ ID NO:463, SEQ ID NO:464, SEQ ID NO:465, SEQ ID NO:466, SEQ ID NO:467, SEQ ID NO:468, SEQ ID NO:469, SEQ ID NO:470, SEQ ID NO:471, SEQ ID NO:472, SEQ ID NO:473, SEQ ID NO:474, SEQ ID NO:475, SEQ ID NO:476, SEQ ID NO:477, SEQ ID NO:478, SEQ ID NO:479, SEQ ID NO:480, SEQ ID NO:481, SEQ ID NO:482, SEQ ID NO:483, SEQ ID NO:484, SEQ ID NO:485, SEQ ID NO:486, SEQ ID NO:487, SEQ ID NO:488, SEQ ID NO:489, SEQ ID NO:490, SEQ ID NO:491, SEQ ID NO:492, SEQ ID NO:493, SEQ ID NO:494, SEQ ID NO:495, SEQ ID NO:496, SEQ ID NO:497, SEQ ID NO:498, SEQ ID NO:499, SEQ ID NO:500, SEQ ID NO:501, SEQ ID NO:502, SEQ ID NO:503, SEQ ID NO:504, SEQ ID NO:505, SEQ ID NO:506, SEQ ID NO:507, SEQ ID NO:508, SEQ ID NO:509, SEQ ID NO:510, SEQ ID NO:511, SEQ ID NO:512, SEQ ID NO:513, SEQ ID NO:514, SEQ ID NO:515, SEQ ID NO:516, SEQ ID NO:517, SEQ ID NO:518, SEQ ID NO:519, SEQ ID NO:520, SEQ ID NO:521, SEQ ID NO:522, SEQ ID NO:523, SEQ ID NO:524, SEQ ID NO:525, SEQ ID NO:526, SEQ ID NO:527, SEQ ID NO:528, SEQ ID NO:529, SEQ ID NO:530, SEQ ID NO:531, SEQ ID NO:532, SEQ ID NO:533, SEQ ID NO:534, SEQ ID NO:535, SEQ ID NO:536, SEQ ID NO:537, SEQ ID NO:538, SEQ ID NO:539, SEQ ID NO:540, SEQ ID NO:541, SEQ ID NO:542, SEQ ID NO:543, SEQ ID NO:544, SEQ ID NO:545, SEQ ID NO:546, SEQ ID NO:547, SEQ ID NO:548, SEQ ID NO:549, SEQ ID NO:550, SEQ ID NO:551, SEQ ID NO:552, SEQ ID NO:553, SEQ ID NO:554, SEQ ID NO:555, SEQ ID NO:556, SEQ ID NO:557, SEQ ID NO:558, SEQ ID NO:559, SEQ ID NO:560, SEQ ID NO:561, SEQ ID NO:562, SEQ ID NO:563, SEQ ID NO:564, SEQ ID NO:565, SEQ ID NO:566, SEQ ID NO:567, SEQ ID NO:568, SEQ ID NO:569, SEQ ID NO:570, SEQ ID NO:571, SEQ ID NO:572, SEQ ID NO:573, SEQ ID NO:574, SEQ ID NO:575, SEQ ID NO:576, SEQ ID NO:577, SEQ ID NO:578, SEQ ID NO:579, SEQ ID NO:580, SEQ ID NO:581, SEQ ID NO:582, SEQ ID NO:583, SEQ ID NO:584, SEQ ID NO:585, SEQ ID NO:586, SEQ ID NO:587, SEQ ID NO:588, SEQ ID NO:589, SEQ ID NO:590, SEQ ID NO:591, SEQ ID NO:592;
or to a complement of said sequence.

4. The polynucleotide of any one of claims 1-3, wherein said polynucleotide is operably linked to at least one expression control sequence.

5. A vector comprising the polynucleotide of claim 4.

6. A host cell transformed with a vector comprising the polynucleotide of any one of claims 1-3.

7. A process for producing a protein encoded by the polynucleotide of claim 4, which process comprises:
(a) growing a culture of a host cell in a suitable culture medium, wherein the host cell has been transformed with the polynucleotide of claim 4; and
(b) purifying said protein from the culture.

8. A protein produced according to the process of claim 7.

9. An antibody that specifically binds to the protein of claim 8.

10. A method for detecting the protein of claim 8, comprising contacting a sample suspected of containing the protein with an antibody that specifically binds to the protein, under conditions such that the antibody binds the protein and the protein is detected.

11. A method for detecting the polynucleotide of any one of claims 1-3, comprising contacting a sample suspected of containing the polynucleotide with a polynucleotide reagent that hybridizes to the polynucleotide, under conditions such that the reagent binds the polynucleotide and the polynucleotide is detected.

12. The method of claim 10, wherein the sample is a biological sample.

13. The method of claim 12, where the biological sample is isolated from a human.

14. The method of claim 11, wherein the sample is a biological sample.

15. The method of claim 14, where the biological sample is isolated from a human.

16. A method of identifying a compound that modulates the activity of the protein of claim 8, comprising contacting a composition comprising the protein with a test compound and monitoring the effect of the test compound on the activity of the protein, such that a modulatory compound is identified.

17. A method of identifying a compound that modulates the expression of the polynucleotide of any one of claims 1-3, comprising contacting a cell that expresses the polynucleotide with a test compound and determining the effect of the test compound on the expression of the polynucleotide, such that a modulatory compound is identified.

18. A method of identifying a compound that modulates the production of the protein of claim 8, comprising contacting a cell that produces the protein with the test compound and determining the effect of the test compound on the production of the protein, such that a modulatory compound is identified.

19. A method of treating a subject having a disorder characterized by aberrant expression of the polynucleotide of any one of claims 1-3, comprising administering to said subject a therapeutically effective amount of a compound that modulates expression of the polypeptide, such that treatment is effected.

20. A method of treating a subject having a disorder characterized by aberrant production of the protein of claim 8, comprising administering to said subject a therapeutically effective amount of a compound that modulates production of the protein, such that treatment is effected.

21. A method of treating a subject having a disorder characterized by aberrant activity of the protein of claim 8, comprising administering to said subject a therapeutically effective amount of a compound that modulates activity of the protein, such that treatment is effected.
